(19) United States
(12) Patent Application Publication
(10) Pub. No.: US 2008/0206841 A1
(43) Pub. Date: Aug. 28, 2008

(54) Nucleic acid sequences from Chlorella vulgaris and uses thereof

(76) Inventors: Raghunath V. Lalgudi, Clayton, MO (US); Philip W. Miller, Ballwin, MO (US); Keith O'Connell, Kirkwood, MO (US)

Correspondence Address: ARNOLD & PORTER, LLP, 555 TWELFTH STREET, N.W., ATTN: IP DOCKETING, WASHINGTON, DC, 20004, US

(21) Appl. No.: 11/239,592

(22) Filed: Sep. 30, 2005

Related U.S. Application Data
(63) Continuation of application No. 09/540,215, filed on Apr. 3, 2000, now abandoned.
(60) Provisional application No. 60/128,436, filed on Apr. 6, 1999.

(51) Int. Cl. C12N 1/12; C07H 21/00

(52) U.S. Cl. 435/257.2; 536/23.7

(57) ABSTRACT

Expressed Sequence Tags (ESTs) isolated from the unicellular green algae, Chlorella vulgaris, are disclosed. The invention encompasses nucleic acid molecules that encode Chlorella protein homologs and fragments thereof. In addition, antibodies capable of binding the proteins are encompassed by the present invention. The disclosed ESTs have particular utility in isolating genes and promoters, identifying and mapping the genes involved in developmental and metabolic pathways, and determining gene function. The ESTs provide a unique molecular tool for the targeting and isolation of novel genes for plant protection and improvement. The invention also relates to methods of using the disclosed nucleic acid molecules, proteins, fragments of proteins, and antibodies, for example, for gene identification and analysis, and preparation of constructs.

### CROSS-REFERENCE TO RELATED APPLICATIONS

[0001] This application claims priority under 35 U.S.C §119(e) of U.S. Provisional Application Ser. No. 60/128,436 filed on Apr. 6, 1999, the entire content of which is incorporated herein by reference.

### FIELD OF THE INVENTION

[0002] The present invention is in the field of molecular biology; more particularly, the present invention relates to nucleic acid sequences from the unicellular green algae, Chlorella vulgaris. The invention encompasses nucleic acid molecules that encode proteins and fragments of proteins. In addition, proteins and fragments of proteins so encoded and antibodies capable of binding the proteins are encompassed by the present invention. The invention also relates to methods of using the disclosed nucleic acid molecules, proteins, fragments of proteins, and antibodies, for example, for gene identification and analysis, and preparation of constructs.

### BACKGROUND OF THE INVENTION

[0003] I. Chlorella vulgaris

[0004] The present invention relates in part to DNA sequences from cDNA libraries from the unicellular green algae, Chlorella vulgaris. The green algal genus Chlorella includes a variety of species (Fott and Novakova, In: Studies in Phycology: A Monograph of the Genus Chlorella, Fott, B. (ed.), Prag: Verlag Acad. Sissensch, pp. 10-74 (1969), herein incorporated by reference in its entirety), some of which have long been served as model organisms in plant physiological and biochemical studies (Govindjee and Braun, In: Algal Physiology and Biochemistry, W. D. P. Stewart (ed.), University of California Press, Berkeley and Los Angeles, pp. 346-390, herein incorporated by reference in its entirety). Chlorella belongs to the eucaryotic cell category of algae and lives in fresh water as a single celled plant Its size is approximately 2-8 microns in diameter. The name Chlorella derives from two Latin words meaning ‘leaf’ (green) and ‘small’, referring to the unusually high content of chlorophyll which gives Chlorella its characteristic deep emerald-green color. Chlorella is also rich in protein, vitamins, minerals, “C.G.F.” (Chlorella Growth Factor) and other beneficial substances. Unicellular green algae Chlorella are currently being used to produce compounds of commercial value (Behrens et al., J. Applied Phycology 6: 113-122 (1994); Running et al., J. Applied Phycology 6: 99-104 (1994), both of which are herein incorporated by reference in their entirety).

[0005] It is generally believed that land plants evolved from green algae (Graham, J. Plant Res. 109: 241-251 (1996), herein incorporated by reference in its entirety) and that during this revolution, extensive rearrangements occurred within the chloroplast genome. The complete nucleotide sequence of the chloroplast genome (150613 bp) from the unicellular green alga Chlorella vulgaris has been determined (Wakasugi, et al., Proc. Natl. Acad. Sci. USA 94:5967-5972 (1997), herein incorporated by reference in its entirety). The chloroplast genome of Chlorella vulgaris contains one copy of rRNA gene consisting of 16S, 23S, and 5S rRNA genes; thirty one tRNA gene, sixty-nine protein genes; eight ORFs conserved with those found in land chloroplasts; two adjacent genes homologous to bacterial genes (minD and minE) involved in cell division; genes encoding ribosomal proteins L5, L12, L19 and S9; and two long ORF's related to ycf1 and ycf2 that are exclusively found in land plants (Wakasugi, et al., Proc. Natl. Acad. Sci. USA 94: 5967-5972 (1997), herein incorporated by reference in its entirety). Chlorella vulgaris is closer to land plants than the red and brown algae.

[0006] The genome of the unicellular green alga Chlorella vulgaris is only 38.8 Mb and consists of 16 chromosomes ranging from 980 kb to 4.0 Mb in size. (Higashiyama and Yamada, Nucleic Acid Res. 19: 6191-6195 (1991), herein incorporated by reference in its entirety). Each chromosome can be resolved by pulse-field gel electrophoresis. The smallest chromosome of this organism (Chromosome I, 980 kb in size) can be routinely isolated intact in large quantities. Restriction mapping and sequences analyses revealed that the telomeres of this chromosme consist of 5′-TTTAGGG repeats running from the centomere towards the termini; this sequence is identical to those reported for several higher plants including maize, Arabidopsis thaliana and tomato (Higashiyama, et al., Mol. Gen. Genet. 246: 29-36 (1995), herein incorporated by reference in its entirety). A set of overlapping cosmid clones (contig) have been constructed for Chlorella chromosome I (Noutoshi, et al., Nucleic Acid Res. 26:3900-3907 (1998), herein incorporated by reference in its entirety).

### II. Expressed Sequence Tag Nucleic Acid Molecules

[0007] Expressed sequence tags, or ESTs, are short sequences of randomly selected clones from a cDNA (or complementary DNA) library which are representative of the cDNA inserts of these randomly selected clones (McCombie, et al., Nature Genetics, 1:124-130 (1992); Kurata, et al., Nature Genetics, 8: 365-372 (1994); Okubo, et al., Nature Genetics, 2: 173-179 (1992), all of which are herein incorporated by reference in their entirety). The randomly selected clones comprise inserts that can represent a copy of up to the full length of a mRNA transcript.

[0008] Using conventional methodologies, cDNA libraries can be constructed from the mRNA (messenger RNA) of a given tissue or organism using poly dT primers and reverse transcriptase (Efstratiadis, et al., Cell 7:279-288 (1976); Higuchi, et al., Proc. Natl. Acad. Sci. (U.S.A.) 73:3146-3150 (1976); Maniatis, et al., Cell 8:163 (1976); Land, et al., Nucleic Acids Res. 9:2251-2266 (1981); Okayama, et al., Mol. Cell. Biol. 2:161-170 (1982); Gubler, et al., Gene 25:263 (1983), all of which are herein incorporated by reference in their entirety).

[0009] Several methods may be employed to obtain full-length cDNA constructs. For example, terminal transferase can be used to add homopolymeric tails of dC residues to the free 3′ hydroxyl groups (Land, et al., Nucleic Acids Res. 9:2251-2266 (1981), herein incorporated by reference in its entirety). This tail can then be hybridized by a poly dG oligo which can act as a primer for the synthesis of full length second strand cDNA (Okayama and Berg, Mol. Cell. Biol. 2:161-170 (1982), herein incorporated by reference in its entirety), report a method for obtaining full length cDNA constructs. This method has been simplified by using synthetic primer-adapters that have both homopolymeric tails for priming the synthesis of the first and second strands and restriction sites for cloning into plasmids (Coleclough, et al., Gene 34:305-314 (1985), herein incorporated by reference in its entirety) and bacteriophage vectors (Krawinkel, et al., Nucleic Acids Res. 14:1913 (1986); Han, et al., Nucleic Acids Res. 15:6304 (1987), all of which are herein incorporated by reference in their entirety).

[0010] These strategies have been coupled with additional strategies for isolating rare mRNA populations. For example, a typical mammalian cell contains between 10,000 and 30,000 different mRNA sequences (Davidson, Gene Activity in Early Development, 2nd ed., Academic Press, New York (1976), herein incorporated by reference in its entirety). The number of clones required to achieve a given probability that a low-abundance mRNA will be present in a cDNA library is N=(1 n(1−P))/(1 n(1−1/n)) where N is the number of clones required, P is the probability desired, and 1/n is the fractional proportion of the total mRNA that is represented by a single rare mRNA. (Sambrook, et al., Molecular Cloning: A Laboratory Manual, 2nd ed., Cold Spring Harbor Laboratory Press (1989), herein incorporated by reference in its entirety.).

[0011] A method to enrich preparations of mRNA for sequences of interest is to fractionate by size. One such method is to fractionate by electrophoresis through an agarose gel (Pennica, et al., Nature 301:214-221 (1983), herein incorporated by reference in its entirety). Another such method employs sucrose gradient centrifugation in the presence of an agent, such as methylmercuric hydroxide, that denatures secondary structure in RNA (Schweinfest, et al., Proc. Natl. Acad. Sci. (U.S.A.) 79:4997-5000 (1982), herein incorporated by reference in its entirety).

[0012] A frequently adopted method is to construct equalized or normalized cDNA libraries (Ko, Nucleic Acids Res. 18:5705-5711 (1990); Patanjali, S. R et al., Proc. Natl. Acad. Sci. (U.S.) 88:1943-1947 (1991), all of which are herein incorporated by reference in their entirety). Typically, the cDNA population is normalized by subtractive hybridization (Schmid, et al., J. Neurochem 48:307-312 (1987); Fargnoli, et al., Anal. Biochem. 187:364-373 (1990); Travis, et al., Proc. Natl. Acad. Sci (U.S.A.) 85:1696-1700 (1988); Kato, Eur. J. Neurosci. 2:704 (1990); and Schweinfest, et al., Genet. Anal. Tech Appl. 7:64 (1990), all of which are herein incorporated by reference in their entirety). Subtraction represents another method for reducing the population of certain sequences in the cDNA library (Swaroop, et al., Nucleic Acids Res. 19:1954 (1991), herein incorporated by reference in its entirety).

[0013] ESTs can be sequenced by a number of methods. Two basic methods may be used for DNA sequencing, the chain termination method of Sanger et al., Proc. Natl. Acad. Sci. (U.S.A.) 74: 5463-5467 (1977), herein incorporated by reference in its entirety and the chemical degradation method of Maxam and Gilbert, Proc. Nat. Acad. Sci. (U.S.A.) 74: 560-564 (1977), herein incorporated by reference in its entirety. Automation and advances in technology such as the replacement of radioisotopes with fluorescence-based sequencing have reduced the effort required to sequence DNA (Craxton, Methods, 2: 20-26 (1991); Ju et al., Proc. Natl. Acad. Sci. (U.S.A.) 92: 4347-4351 (1995); Tabor and Richardson, Proc. Natl. Acad. Sci. (U.S.A.) 92: 6339-6343 (1995), all of which are herein incorporated by reference in their entirety). Automated sequencers are available from, for example, Pharmacia Biotech, Inc., Piscataway, N.J. (Pharmacia ALF), LI-COR, Inc., Lincoln, Nebr. (LI-COR 4,000) and Millipore, Bedford, Mass. (Millipore BaseStation).

[0014] In addition, advances in capillary gel electrophoresis have also reduced the effort required to sequence DNA and such advances provide a rapid high resolution approach for sequencing DNA samples (Swerdlow and Gesteland, Nucleic Acids Res. 18:1415-1419 (1990); Smith, Nature 349:812-813 (1991); Luckey et al., Methods Enzymol. 218:154-172 (1993); Lu et al., J. Chromatog. A. 680:497-501 (1994); Carson et al., Anal. Chem. 65:3219-3226 (1993); Huang et al., Anal. Chem. 64:2149-2154 (1992); Kheterpal et al., Electrophoresis 17:1852-1859 (1996); Quesada and Zhang, Electrophoresis 17:1841-1851 (1996); Baba, Yakugaku Zasshi 117:265-281 (1997), all of which are herein incorporated by reference in their entirety).

[0015] ESTs longer than 150 base pairs have been found to be useful for similarity searches and mapping. (Adams, et al., Science 252:1651-1656 (1991), herein incorporated by reference.) ESTs, which can represent copies of up to the full length transcript, may be partially or completely sequenced. Between 150-450 nucleotides of sequence information is usually generated as this is the length of sequence information that is routinely and reliably produced using single run sequence data. Typically, only single run sequence data is obtained from the cDNA library (Adams, et al., Science 252:1651-1656 (1991), herein incorporated by reference in its entirety). Automated single run sequencing typically results in an approximately 2-3% error or base ambiguity rate. (Boguski, et al., Nature Genetics, 4:332-333 (1993), herein incorporated by reference in its entirety).

[0016] EST databases have been constructed or partially constructed from, for example, C. elegans (McCombrie, et al., Nature Genetics 1:124-131 (1992), herein incorporated by reference in its entirety), human liver cell line HepG2 (Okubo, et al., Nature Genetics 2:173-179 (1992), herein incorporated by reference in its entirety), human brain RNA (Adams, et al., Science 252:1651-1656 (1991); Adams, et al., Nature 355:632-635 (1992), all of which are herein incorporated by reference in their entirety), Arabidopsis, (Newman, et al., Plant Physiol. 106:1241-1255 (1994), herein incorporated by reference in its entirety); and rice (Kurata, et al., Nature Genetics 8:365-372 (1994), herein incorporated by reference in its entirety).

### III. Sequence Comparisons

[0017] A characteristic feature of a DNA sequence is that it can be compared with other known DNA sequences. Sequence comparisons can be undertaken by determining the similarity of the test or query sequence with sequences in publicly available or propriety databases (“similarity analysis”) or by searching for certain motifs (“intrinsic sequence analysis”) (e.g. cis elements) (Coulson, Trends in Biotechnology 12: 76-80 (1994); Birren, et al, Genome Analysis, 1: 543-559 (1997), all of which are herein incorporated by reference in their entirety).

[0018] Similarity analysis includes database search and alignment. Examples of public databases include the DNA Database of Japan (DDBJ) (http://www.ddbj.nig.ac.jp/); Genebank (http://www.ncbi.nlm.nih.gov/web/Genbank/Index.htlm); and the European Molecular Biology Laboratory Nucleic Acid Sequence Database (EMBL) (http://www.ebi.ac.uk/ebi_docs/embl_db.html). A number of different search algorithms have been developed, one example of which are the suite of programs referred to as BLAST programs. There are five implementations of BLAST, three designed for nucleotide sequences queries (BLASTN, BLASTX, and TBLASTX) and two designed for protein sequence queries (BLASTP and TBLASTN) (Coulson, Trends in Biotechnology 12: 76-80 (1994); Birren et al., Genome Analysis 1: 543-559 (1997), all of which are herein incorporated by reference in their entirety).

[0019] BLASTN takes a nucleotide sequence (the query sequence) and its reverse complement and searches them against a nucleotide sequence database. BLASTN was designed for speed, not maximum sensitivity, and may not find distantly related coding sequences. BLASTX takes a nucleotide sequence, translates it in three forward reading frames and three reverse complement reading frames, and then compares the six translations against a protein sequence database. BLASTX is useful for sensitive analysis of preliminary (single-pass) sequence data and is tolerant of sequencing errors (Gish and States, Nature Genetics 3: 266-272 (1993), herein incorporated by reference in its entirety). BLASTN and BLASTX may be used in concert for analyzing EST data (Coulson, Trends in Biotechnology 12: 76-80 (1994); Birren et al., Genome Analysis 1: 543-559 (1997), all of which are herein incorporated by reference in their entirety).

[0020] Given a coding nucleotide sequence and the protein it encodes, it is often preferable to use the protein as the query sequence to search a database because of the greatly increased sensitivity to detect more subtle relationships. This is due to the larger alphabet of proteins (20 amino acids) compared with the alphabet of nucleic acid sequences (4 bases), where it is far easier to obtain a match by chance. In addition, with nucleotide alignments, only a match (positive score) or a mismatch (negative score) is obtained, but with proteins, the presence of conservative amino acid substitutions can be taken into account Here, a mismatch may yield a positive score if the non-identical residue has physical/chemical properties similar to the one it replaced. Various scoring matrices are used to supply the substitution scores of all possible amino acid pairs. A general purpose scoring system is the BLOSUM62 matrix (Henikoff and Henikoff, Proteins 17: 49-61 (1993), herein incorporated by reference in its entirety), which is currently the default choice for BLAST programs. BLOSUM62 is tailored for alignments of moderately diverged sequences and thus may not yield the best results under all conditions (Altschul, J. Mol. Biol. 36: 290-300 (1993), herein incorporated by reference in its entirety), uses a combination of three matrices to cover all contingencies. This may improve sensitivity, but at the expense of slower searches. In practice, a single BLOSUM62 matrix is often used but others (PAM40 and PAM250) may be attempted when additional analysis is necessary. Low PAM matrices are directed at detecting very strong but localized sequence similarities, whereas high PAM matrices are directed at detecting long but weak alignments between very distantly related sequences.

[0021] Homologues in other organisms are available that can be used for comparative sequence analysis. Multiple alignments are performed to study similarities and differences in a group of related sequences. CLUSTAL W is a multiple sequence alignment package available that performs progressive multiple sequence alignments based on the method of Feng and Doolittle, J. Mol. Evol. 25: 351-360 (1987), herein incorporated by reference in its entirety. Each pair of sequences is aligned and the distance between each pair is calculated; from this distance matrix, a guide tree is calculated, and all of the sequences are progressively aligned based on this tree. A feature of the program is its sensitivity to the effect of gaps on the alignment; gap penalties are varied to encourage the insertion of gaps in probable loop regions instead of in the middle of structured regions. Users can specify gap penalties, choose between a number of scoring matrices, or supply their own scoring matrix for both the pairwise alignments and the multiple alignments. CLUSTAL W for UNIX and VMS systems is available at: ftp.ebi.ac.uk. Another program is MACAW (Schuler et al., Proteins, Struct. Func. Genet. 9: 180-190 (1991), herein incorporated by reference in its entirety), for which both Macintosh and Microsoft Windows versions are available. MACAW uses a graphical interface, provides a choice of several alignment algorithms, and is available by anonymous ftp at: ncbi.nlm.nih.gov (directory/pub/macaw).

[0022] Sequence motifs are derived from multiple alignments and can be used to examine individual sequences or an entire database for subtle patterns. With motifs, it is sometimes possible to detect distant relationships that may not be demonstrable based on comparisons of primary sequences alone. Currently, the largest collection of sequence motifs in the world is. PROSITE (Bairoch and Bucher, Nucleic Acid Research 22: 3583-3589 (1994), herein incorporated by reference in its entirety). PROSITE may be accessed via either the ExPASy server on the World Wide Web or anonymous ftp site. Many commercial sequence analysis packages also provide search programs that use PROSITE data.

[0023] A resource for searching protein motifs is the BLOCKS E-mail server developed by S. Henikoff (Henikoff, Trends Biochem Sci. 18: 267-268 (1993); Henikoff and Henikoff, Nucleic Acid Research 19: 65656572 (1991); Henikoff and Henikoff, Proteins 17: 49-61 (1993), all of which are herein incorporated by reference in their entirety). BLOCKS searches a protein or nucleotide sequence against a database of protein motifs or “blocks.” Blocks are defined as short, ungapped multiple alignments that represent highly conserved protein patterns. The blocks themselves are derived from entries in PROSITE as well as other sources. Either a protein or nucleotide query can be submitted to the BLOCKS server; if a nucleotide sequence is submitted, the sequence is translated in all six reading frames and motifs are sought in these conceptual translations. Once the search is completed, the server will return a ranked list of significant matches, along with an alignment of the query sequence to the matched BLOCKS entries.

[0024] Conserved protein domains can be represented by two-dimensional matrices, which measure either the frequency or probability of the occurrences of each amino acid residue and deletions or insertions in each position of the domain. This type of model, when used to search against protein databases, is sensitive and usually yields more accurate results than simple motif searches. Two popular implementations of this approach are profile searches (such as GCG program ProfileSearch) and Hidden Markov Models (HMMs) (Krough et al., J. Mol. Biol. 235: 1501-1531 (1994); Eddy, Current Opinion in Structural Biology 6: 361-365 (1996), both of which are herein incorporated by reference in their entirety). In both cases, a large number of common protein domains have been converted into profiles, as present in the PROSITE library, or HHM models, as in the Pfam protein domain library (Sonnhammer et al., Proteins 28: 405-420 (1997), herein incorporated by reference in its entirety). Pfam contains more than 500 HMM models for enzymes, transcription factors, signal transduction molecules, and structural proteins. Protein databases can be queried with these profiles or HMM models, which will identify proteins containing the domain of interest. For example, HMMSW or HMMFS, two programs in a public domain package called HMMER (Sonnhammer et al., Proteins 28: 405-420 (1997), herein incorporated by reference in its entirety) can be used.

[0025] PROSITE and BLOCKS represent collected families of protein motifs. Thus, searching these databases entails submitting a single sequence to determine whether or not that sequence is similar to the members of an established family. Programs working in the opposite direction compare a collection of sequences with individual entries in the protein databases. An example of such a program is the Motif Search Tool, or MoST (Tatusov et al, Proc. Natl. Acad. Sci. 91:12091-12095 (1994), herein incorporated by reference in its entirety.) On the basis of an aligned set of input sequences, a weight matrix is calculated by using one of four methods (selected by the user); a weight matrix is simply a representation, position by position in an alignment, of how likely a particular amino acid will appear. The calculated weight matrix is then used to search the databases. To increase sensitivity, newly found sequences are added to the original data set, the weight matrix is recalculated, and the search is performed again. This procedure continues until no new sequences are found.

### SUMMARY OF THE INVENTION

[0026] The present invention provides a substantially purified nucleic acid molecule having a nucleic acid sequence selected from the group consisting of SEQ ID NO: 1 through SEQ ID NO: 3519 or complements thereof.

[0027] The present invention also provides a substantially purified nucleic acid molecule, the nucleic acid molecule capable of specifically hybridizing to a second nucleic acid molecule having a nucleic acid sequence selected from the group consisting of SEQ ID NO: 1 through SEQ ID NO: 3519 or complements thereof.

[0028] The present invention further provides a substantially purified protein, peptide, or fragment thereof encoded by a nucleic acid sequence selected from the group consisting of SEQ ID NO: 1 through SEQ ID NO:3519 or complements thereof.

[0029] The present invention also provides a substantially purified nucleic acid molecule encoding an Chlorella vulgaris protein homologue or fragment thereof, wherein the nucleic acid molecules comprises a nucleic acid sequence selected from the group consisting of SEQ ID NO: 1 through SEQ ID NO: 3519.

[0030] The present invention also provides a transformed cell having a nucleic acid molecule which comprises: (A) an exogenous promoter region which functions in the cell to cause the production of a mRNA molecule; which is linked to (B) a structural nucleic acid molecule, wherein the structural nucleic acid molecule comprises a nucleic acid sequence selected from the group consisting of SEQ ID NO: 1 through SEQ ID NO:3519 or complements thereof; which is linked to (C) a 3′ non-translated sequence that functions in the cell to cause termination of transcription and addition of polyadenylated ribonucleotides to a 3′ end of the mRNA molecule.

[0031] The present invention also provides a plant cell, a mammalian cell, a bacterial cell, an insect cell, a fungal cell and an algal cell transformed with a nucleic acid molecule of the present invention.

[0032] The present invention also provides a computer readable medium having recorded thereon one or more of the nucleotide sequences depicted in SEQ ID NO:1 through SEQ ID NO: 3519 or complements thereof.

### DETAILED DESCRIPTION OF THE INVENTION

### Agents of the Invention

[0033] (a) Nucleic Acid Molecules

[0034] Agents of the present invention include nucleic acid molecules and more specifically EST nucleic acid molecules or nucleic acid fragment molecules thereof. Fragment EST nucleic acid molecules may encode significant portion(s) of; or indeed most of, the EST nucleic acid molecule. Alternatively, the fragments may comprise smaller oligonucleotides (having from about 15 to about 250 nucleotide residues, and more preferably, about 15 to about 30 nucleotide residues).

[0035] In a preferred embodiment the nucleic acid molecules of the present invention are derived from a unicellular green alga and in an even more preferred embodiment the nucleic acid molecules of the present invention are derived from unicellular green algae belonging to the genus Chlorella In a particularly preferred embodiment the nucleic acid molecules of the present invention are derived from Chlorella vulgaris.

[0036] The term “substantially purified”, as used herein, refers to a molecule separated from substantially all other molecules normally associated with it in its native state. More preferably a substantially purified molecule is the predominant species present in a preparation. A substantially purified molecule may be greater than 60% free, preferably 75% free, more preferably 90% free, and most preferably 95% free from the other molecules (exclusive of solvent) present in the natural mixture. The term “substantially purified” is not intended to encompass molecules present in their native state.

[0037] The agents of the present invention will preferably be “biologically active” with respect to either a structural attribute, such as the capacity of a nucleic acid to hybridize to another nucleic acid molecule, or the ability of a protein to be bound by antibody (or to compete with another molecule for such binding). Alternatively, such an attribute may be catalytic, and thus involve the capacity of the agent to mediate a chemical reaction or response.

[0038] The agents of the present invention may also be recombinant. As used herein, the term recombinant means any agent (e.g. DNA, peptide etc.), that is, or results, however indirect, from human manipulation of a nucleic acid molecule.

[0039] It is understood that the agents of the present invention may be labeled with reagents that facilitate detection of the agent (e.g. fluorescent labels (Prober, et al., Science 238:336-340 (1987); Albarella et al, EP 144914, chemical labels (Sheldon et al, U.S. Pat. No. 4,582,789; Albarella et al., U.S. Pat. No. 4,563,417, modified bases (Miyoshi et al., EP 119448, all of which are herein incorporated by reference in their entirety).

[0040] It is further understood, that the present invention provides bacterial, viral, microbial, and plant cells comprising the agents of the present invention.

[0041] EST nucleic acid molecules or fragment EST nucleic acid molecules are capable of specifically hybridizing to other nucleic acid molecules under certain circumstances. As used herein, two nucleic acid molecules are said to be capable of specifically hybridizing to one another if the two molecules are capable of forming an anti-parallel, double-stranded nucleic acid structure. A nucleic acid molecule is said to be the “complement” of another nucleic acid molecule if they exhibit complete complementarity. As used herein, molecules are said to exhibit “complete complementarity” when every nucleotide of one of the molecules is complementary to a nucleotide of the other. Two molecules are said to be “minimally complementary” if they can hybridize to one another with sufficient stability to permit them to remain annealed to one another under at least conventional “low-stringency” conditions. Similarly, the molecules are said to be “complementary” if they can hybridize to one another with sufficient stability to permit them to remain annealed to one another under conventional “high-stringency” conditions. Conventional stringency conditions are described by Sambrook, et al., In: Molecular Cloning A Laboratory Manual, 2nd Edition, Cold Spring Harbor Press, Cold Spring Harbor, N.Y. (1989), and by Haymes, et al. In: Nucleic Acid Hybridization, A Practical Approach, IRL Press, Washington, D.C. (1985), herein incorporated by reference in its entirety. Departres from complete complementarity are therefore permissible, as long as such departures do not completely preclude the capacity of the molecules to form a double-stranded structure. Thus, in order for an EST nucleic acid molecule or fragment EST nucleic acid molecule to serve as a primer or probe it need only be sufficiently complementary in sequence to be able to form a stable double-stranded structure under the particular solvent and salt concentrations employed.

[0042] Appropriate stringency conditions which promote DNA hybridization are, for example, 6.0× sodium chloride/sodium citrate (SSC) at about 45° C., followed by a wash of 2.0×SSC at 50° C., are known to those skilled in the art or can be found in Current Protocols in Molecular Biology, John Wiley & Sons, N.Y. (1989), 6.3.1-6.3.6. For example, the salt concentration in the wash step can be selected from a low stringency of about 2.0×SSC at 50° C. to a high stringency of about 0.2×SSC at 50° C. In addition, the temperature in the wash step can be increased from low stringency conditions at room temperature, about 22° C., to high stringency conditions at about 65° C. Both temperature and salt may be varied, or either the temperature or the salt concentration may be held constant while the other variable is changed.

[0043] In a preferred embodiment, a nucleic acid of the present invention will specifically hybridize to one or more of the nucleic acid molecules set forth in SEQ ID NO: 1 through SEQ ID NO: 3519 or complements thereof under moderately stringent conditions, for example at about 2.0×SSC and about 65° C.

[0044] In a particularly preferred embodiment, a nucleic acid of the present invention will include those nucleic acid molecules that specifically hybridize to one or more of the nucleic acid molecules set forth in SEQ ID NO: 1 through SEQ ID NO: 3519 or complements thereof under high stringency conditions.

[0045] In one aspect of the present invention, the nucleic acid molecules of the present invention have one or more of the nucleic acid sequences set forth in SEQ ID NO: 1 through to SEQ ID NO:3519 or complements thereof. In another aspect of the present invention, one or more of the nucleic acid molecules of the present invention share between 100% and 90% sequence identity with one or more of the nucleic acid sequences set forth in SEQ ID NO: 1 through to SEQ ID NO:3519 or complements thereof. In a further aspect of the present invention, one or more of the nucleic acid molecules of the present invention share between 100% and 95% sequence identity with one or more of the nucleic acid sequences set forth in SEQ ID NO: 1 through to SEQ ID NO:3519 or complements thereof. In a more preferred aspect of the present invention, one or more of the nucleic acid molecules of the present invention share between 100% and 98% sequence identity with one or more of the nucleic acid sequences set forth in SEQ ID NO: 1 through to SEQ ID NO:3519 or complements thereof. In an even more preferred aspect of the present invention, one or more of the nucleic acid molecules of the present invention share between 100% and 99% sequence identity with one or more of the sequences set forth in SEQ ID NO: 1 through to SEQ ID NO:3519 or complements thereof. In a further, even more preferred aspect of the present invention, one or more of the nucleic acid molecules of the present invention exhibit 100% sequence identity with one or more nucleic acid molecules present within the cDNA library LIB191, herein designated (Monsanto Company, St Louis, Mo., United States of America).

[0046] The degeneracy of the genetic code, which allows different nucleic acid sequences to code for the same protein or peptide, is known in the literature. (U.S. Pat. No. 4,757,006, herein incorporated by reference in its entirety). As used herein a nucleic acid molecule is degenerate of another nucleic acid molecule when the nucleic acid molecules encode for the same amino acid sequences but comprise different nucleotide sequences. An aspect of the present invention is that the nucleic acid molecules of the present invention include nucleic acid molecules that are degenerate of those set forth in SEQ ID NO: 1 through to SEQ ID NO:3519 or complements thereof.

[0047] (b) Protein and Peptide Molecules

[0048] A class of agents comprises one or more of the protein or peptide molecules encoded by SEQ ID NO: 1 through SEQ ID NO:3519 or one or more of the protein or fragment thereof or peptide molecules encoded by other nucleic acid agents of the present invention. Protein and peptide molecules can be identified using known protein or peptide molecules as a target sequence or target motif in the BLAST programs of the present invention. In a preferred embodiment the protein or fragment molecules of the present invention are derived from Chlorella vulgaris. As used herein, the term “protein molecule” or “peptide molecule” includes any molecule that comprises five or more amino acids. It is well known in the art that proteins may undergo modification, including post-translational modifications, such as, but not limited to, disulfide bond formation, glycosylation, phosphorylation, or oligomerization. Thus, as used herein, the term “protein molecule” or “peptide molecule” includes any protein molecule that is modified by any biological or non-biological process. The terms “amino acid” and “amino acids” refer to all naturally occurring L-amino acids. This definition is meant to include norleucine, ornithine, homocysteine, and homoserine.

[0049] One or more of the protein or fragment of peptide molecules may be produced via chemical synthesis, or more preferably, by expressing in a suitable bacterial or eukaryotic host. Suitable methods for expression are described by Sambrook, et al., (In: Molecular Cloning, A Laboratory Manual, 2nd Edition, Cold Spring Harbor Press, Cold Spring Harbor, N.Y. (1989), herein incorporated by reference in its entirety), or similar texts.

[0050] A “protein fragment” is a peptide or polypeptide molecule whose amino acid sequence comprises a subset of the amino acid sequence of that protein. A protein or fragment thereof that comprises one or more additional peptide regions not derived from that protein is a “fusion” protein. Such molecules may be derivatized to contain carbohydrate or other moieties (such as keyhole limpet hemocyanin, etc.). Fusion protein or peptide molecule of the present invention are preferably produced via recombinant means.

[0051] Another class of agents comprise protein or peptide molecules encoded by SEQ ID NO: 1 through SEQ ID NO:3519 or, fragments or fusions thereof in which non-essential, or not relevant, amino acid residues have been added, replaced, or deleted. An example of such a homologue is the homologue protein of a plant, including but not limited to soybean, alfalfa, Arabidopsis, barley, cotton, corn, oat, oilseed rape, rice, canola, maize, ornamentals, sugarcane, sugarbeet, tomato, potato, wheat, and turf grasses. Such a homologue can be obtained by any of a variety of methods. Most preferably, as indicated above, one or more of the disclosed sequences (e.g., SEQ ID. NO: 1 through SEQ ID NO:3519 or complements thereof) will be used to define a pair of primers that may be used to isolate the homologue-encoding nucleic acid molecules from any desired species. Such molecules can be expressed to yield homologues by recombinant means.

[0052] In a preferred embodiment of the present invention, a Chlorella vulgaris protein or fragment thereof of the present invention is a homologue of another algal protein. In another preferred embodiment of the present invention, a Chlorella vulgaris protein or fragment thereof of the present invention is a homologue of a fungal protein. In another preferred embodiment of the present invention, a Chlorella vulgaris protein or fragment thereof of the present invention is a homologue of mammalian protein. In another preferred embodiment of the present invention, a Chlorella vulgaris protein or fragment thereof of the present invention is a homologue of a bacterial protein.

[0053] In a preferred embodiment of the present invention, the nucleic molecule of the present invention encodes a Chlorella vulgaris protein or fragment thereof where a Chlorella vulgaris protein or fragment thereof exhibits a BLAST probability score of greater than E-12, preferably a BLAST probability score of between about 1E-30 and about 1E-12, even more preferably a BLAST probability score of greater than 1E-30 with its homologue.

[0054] In another preferred embodiment of the present invention, the nucleic acid molecule encoding a Chlorella vulgaris protein or fragment thereof exhibits a % identity with its homologue of between about 25% and about 40%/, more preferably of between about 40 and about 70%, even more preferably of between about 70% and about 90% and even more preferably between about 90% and 99%. In another preferred embodiment, of the present invention, a Chlorella vulgaris protein or fragment thereof exhibits a % identity with its homologue of 100%.

[0055] In a preferred embodiment of the present invention, the nucleic molecule of the present invention encodes a Chlorella vulgaris protein or fragment thereof where the Chlorella vulgaris protein exhibits a BLAST score of greater than 120, preferably a BLAST score of between about 1450 and about 120, even more preferably a BLAST score of greater than 1450 with its homologue.

[0056] The degeneracy of the genetic code, which allows different nucleic acid sequences to code for the same protein or peptide, is known in the literature. (U.S. Pat. No. 4,757,006, herein incorporated by reference in its entirety). As used herein a nucleic acid molecule is degenerate of another nucleic acid molecule when the nucleic acid molecules encode for the same amino acid sequences but comprise different nucleotide sequences.

[0057] In an aspect of the present invention, one or more of the nucleic acid molecules of the present invention differ in nucleic acid sequence from those encoding a Chlorella vulgaris protein or fragment thereof in SEQ ID NO: 1 through SEQ ID NO: 3519 due to the degeneracy in the genetic code in that they encode the same protein but differ in nucleic acid sequence.

[0058] In another further aspect of the present invention, nucleic acid molecules of the present invention can comprise sequences, which differ from those encoding a protein or fragment thereof in SEQ ID NO: 1 through SEQ ID NO: 3519 due to fact that the different nucleic acid sequence encodes a protein having one or more conservative amino acid changes. It is understood that codons capable of coding for such conservative amino acid substitutions are known in the art.

[0059] It is well known in the art that one or more amino acids in a native sequence can be substituted with another amino acid(s), the charge and polarity of which are similar to that of the native amino acid, i.e., a conservative amino acid substitution, resulting in a silent change. Conserved substitutes for an amino acid within the native polypeptide sequence can be selected from other members of the class to which the naturally occurring amino acid belongs. Amino acids can be divided into the following four groups: (1) acidic amino acids, (2) basic amino acids, (3)-neutral polar amino acids, and (4) neutral nonpolar amino acids. Representative amino acids within these various groups include, but are not limited to, (1) acidic (negatively charged) amino acids such as aspartic acid and glutamic acid; (2) basic (positively charged) amino acids such as arginine, histidine, and lysine; (3) neutral polar amino acids such as glycine, serine, threonine, cysteine, cystine, tyrosine, asparagine, and glutamine; and (4) neutral nonpolar (hydrophobic) amino acids such as alanine, leucine, isoleucine, valine, proline, phenylalanine, tryptophan, and methionine.

[0060] Conservative amino acid changes within the native polypeptides sequence can be made by substituting one amino acid within one of these groups with another amino acid within the same group. Biologically functional equivalents of the proteins or fragments thereof of the present invention can have 10 or fewer conservative amino acid changes, more preferably seven or fewer conservative amino acid changes, and most preferably five or fewer conservative amino acid changes. The encoding nucleotide sequence will thus have corresponding base substitutions, permitting it to encode biologically functional equivalent forms of the proteins or fragments of the present invention.

[0061] It is understood that certain amino acids may be substituted for other amino acids in a protein structure without appreciable loss of interactive binding capacity with structures such as, for example, antigen-binding regions of antibodies or binding sites on substrate molecules. Because it is the interactive capacity and nature of a protein that defines that protein's biological functional activity, certain amino acid sequence substitutions can be made in a protein sequence and, of course, its underlying DNA coding sequence and, nevertheless, obtain a protein with like properties. It is thus contemplated by the inventors that various changes may be made in the peptide sequences of the proteins or fragments of the present invention, or corresponding DNA sequences that encode said peptides, without appreciable loss of their biological utility or activity. It is understood that codons capable of coding for such amino acid changes are known in the art.

[0062] In making such changes, the hydropathic index of amino acids may be considered. The importance of the hydropathic amino acid index in conferring interactive biological function on a protein is generally understood in the art (Kyte and Doolittle, J. Mol. Biol. 157, 105-132 (1982), herein incorporated by reference in its entirety). It is accepted that the relative hydropathic character of the amino acid contributes to the secondary structure of the resultant protein, which in turn defines the interaction of the protein with other molecules, for example, enzymes, substrates, receptors, DNA, antibodies, antigens, and the like.

[0063] Each amino acid has been assigned a hydropathic index on the basis of its hydrophobicity and charge characteristics (Kyte and Doolittle, 1982); these are isoleucine (+4.5), valine (+4.2), leucine (+3.8), phenylalanine (+2.8), cysteine/cystine (+2.5), methionine (+1.9), alanine (+1.8), glycine (−0.4), threonine (−0.7), serine (−0.8), tryptophan (−0.9), tyrosine (−1.3), proline (−1.6), histidine (−3.2), glutamate (−3.5), glutamine (−3.5), aspartate (−3.5), asparagine (−3.5), lysine (−3.9), and arginine (4.5).

[0064] In making such changes, the substitution of amino acids whose hydropathic indices are within ±2 is preferred, those which are within ±1 are particularly preferred, and those within ±0.5 are even more particularly preferred.

[0065] It is also understood in the art that the substitution of like amino acids can be made effectively on the basis of hydrophilicity. U.S. Pat. No. 4,554,101, incorporated herein by reference in its entirety, states that the greatest local average hydrophilicity of a protein, as govern by the hydrophilicity of its adjacent amino acids, correlates with a biological property of the protein.

[0066] As detailed in U.S. Pat. No. 4,554,101, the following hydrophilicity values have been assigned to amino acid residues: arginine (+3.0), lysine (+3.0), aspartate (+3.0±1), glutamate (+3.0±1), serine (+0.3), asparagine (+0.2), glutamine (+0.2), glycine (0), threonine (−0.4), proline (−0.5±1), alanine (−0.5), histidine (−0.5), cysteine (−1.0), methionine (−1.3), valine (−1.5), leucine (−1.8), isoleucine (−1.8), tyrosine (−2.3), phenylalanine (−2.5), and tryptophan (−3.4).

[0067] In making such changes, the substitution of amino acids whose hydrophilicity values are within ±2 is preferred, those which are within ±1 are particularly preferred, and those within ±0.5 are even more particularly preferred.

[0068] In a further aspect of the present invention, one or more of the nucleic acid molecules of the present invention differ in nucleic acid sequence from those encoding a Chlorella vulgaris protein or fragment thereof set forth in SEQ ID NO: 1 through SEQ ID. NO: 3519 or fragment thereof due to the fact that one or more codons encoding an amino acid has been substituted for a codon that encodes a nonessential substitution of the amino acid originally encoded.

[0069] (c) Antibodies

[0070] One aspect of the present invention concerns antibodies, single-chain antigen binding molecules, or other proteins that specifically bind to one or more of the protein or peptide molecules of the present invention and their homologues, fusions or fragments. Such antibodies may be used to quantitatively or qualitatively detect the protein or peptide molecules of the present invention. As used herein, an antibody or peptide is said to “specifically bind” to a protein or peptide molecule of the present invention if such binding is not competitively inhibited by the presence of non-related molecules. In a preferred embodiment the antibodies of the present invention bind to proteins of the present invention. In a more preferred embodiment the antibodies of the present invention bind to proteins derived from Chlorella vulgaris.

[0071] Nucleic acid molecules that encode all or part of the protein of the present invention can be expressed, via recombinant means, to yield protein or peptides that can in turn be used to elicit antibodies that are capable of binding the expressed protein or peptide. Such antibodies may be used in immunoassays for that protein. Such protein-encoding molecules, or their fragments may be a “fusion” molecule (i.e., a part of a larger nucleic acid molecule) such that, upon expression, a fusion protein is produced. It is understood that any of the nucleic acid molecules of the present invention may be expressed, via recombinant means, to yield proteins or peptides encoded by these nucleic acid molecules.

[0072] The antibodies that specifically bind proteins and protein fragments of the present invention may be polyclonal or monoclonal, and may comprise intact immunoglobulins, or antigen binding portions of immunoglobulins (such as (F(ab′), F(ab′)₂) fragments, or single-chain immunoglobulins producible, for example, via recombinant means). It is understood that practitioners are familiar with the standard resource materials which describe specific conditions and procedures for the construction, manipulation and isolation of antibodies (see, for example, Harlow and Lane, In Antibodies: A Laboratory Manual, Cold Spring Harbor Press, Cold Spring Harbor, N.Y. (1988), herein incorporated by reference in its entirety).

[0073] Murine monoclonal antibodies are particularly preferred. BALB/c mice are preferred for this purpose, however, equivalent strains may also be used. The animals are preferably immunized with approximately 25 μg of purified protein (or fragment thereof) that has been emulsified a suitable adjuvant (such as TiterMax adjuvant (Vaxcel, Norcross, Ga.)). Immunization is preferably conducted at two intramuscular sites, one intraperitoneal site, and one subcutaneous site at the base of the tail. An additional i.v. injection of approximately 25 μg of antigen is preferably given in normal saline three weeks later. After approximately 11 days following the second injection, the mice may be bled and the blood screened for the presence of anti-protein or peptide antibodies. Preferably, a direct binding Enzyme-Linked Immunoassay (ELISA) is employed for this purpose.

[0074] More preferably, the mouse having the highest antibody titer is given a third i.v. injection of approximately 25 μg of the same protein or fragment. The splenic leukocytes from this animal may be recovered 3 days later, and are then permitted to fuse, most preferably, using polyethylene glycol, with cells of a suitable myeloma cell line (such as, for example, the P3X63Ag8.653 myeloma cell line). Hybridoma cells are selected by culturing the cells under “HAT” (hypoxanthine-amiopterin-thymine) selection for about one weeks The resulting clones may then be screened for their capacity to produce monoclonal antibodies (“mAbs), preferably by direct ELISA.

[0075] In one embodiment, anti-protein or peptide monoclonal antibodies are isolated using a fusion of a protein, protein fragment, or peptide of the present invention, or conjugate of a protein, protein fragment, or peptide of the present invention, as immunogens. Thus, for example, a group of mice can be immunized using a fusion protein emulsified in Freund's complete adjuvant (e.g. approximately 50 μg of antigen per immunization). At three week intervals, an identical amount of antigen is emulsified in Freund's incomplete adjuvant and used to immunize the animals. Ten days following the third immunization, serum samples are taken and evaluated for the presence of antibody. If antibody titers are too low, a fourth booster can be employed. Polysera capable of binding the protein or peptide can also be obtained using this method.

[0076] In a preferred procedure for obtaining monoclonal antibodies, the spleens of the above-described immunized mice are removed, disrupted, and immune splenocytes are isolated over a ficoll gradient. The isolated splenocytes are fused, using polyethylene glycol with BALB/c-derived HGPRT (hypoxanthine guanine phosphoribosyl transferase) deficient P3×63xAg8.653 plasmacytoma cells. The fused cells are plated into 96-well microtiter plates and screened for hybridoma fusion cells by their capacity to grow in culture medium supplemented with hypothanthine, aminopterin and thymidine for approximately 2-3 weeks.

[0077] Hybridoma cells that arise from such incubation are preferably screened for their capacity to produce an immunoglobulin that binds to a protein of interest. An indirect ELISA may be used for this purpose. In brief, the supernatants of hybridomas are incubated in microtiter wells that contain immobilized protein. After washing, the titer of bound immunoglobulin can be determined using, for example, a goat anti-mouse antibody conjugated to horseradish peroxidase. After additional washing, the amount of immobilized enzyme is determined (for example through the use of a chromogenic substrate). Such screening is performed as quickly as possible after the identification of the hybridoma in order to ensure that a desired clone is not overgrown by non-secreting neighbors. Desirably, the fusion plates are screened several times since the rates of hybridoma growth vary. In a preferred sub-embodiment, a different antigenic form of immunogen may be used to screen the hybridoma. Thus, for example, the splenocytes may be immunized with one immunogen, but the resulting hybridomas can be screened using a different immunogen. It is understood that any of the protein or peptide molecules of the present invention may be used to raise antibodies.

[0078] As discussed below, such antibody molecules or their fragments may be used for diagnostic purposes. Where the antibodies are intended for diagnostic purposes, it may be desirable to derivatized them, for example with a ligand group (such as biotin) or a detectable marker group (such as a fluorescent group, a radioisotope or an enzyme).

[0079] The ability to produce antibodies that bind the protein or peptide molecules of the present invention permits the identification of mimetic compounds of those molecules. A “mimetic compound” is a compound that is not that compound, or a fragment of that compound, but which nonetheless exhibits an ability to specifically bind to antibodies directed against that compound.

[0080] It is understood that any of the agents of the present invention can be substantially purified and/or be biologically active and/or recombinant.

[0081] (d) Algal Constructs and Algal Transformants

[0082] The present invention also relates to an algal recombinant vector comprising exogenous genetic material. The present invention also relates to an algal cell comprising an algal recombinant vector. The present invention also relates to methods for obtaining a recombinant algal host cell comprising introducing into an algal host cell exogenous genetic material.

[0083] Exogenous genetic material is any genetic material, whether naturally occurring or otherwise, from any source that is capable of being inserted into any organism. Exogenous genetic material may be transferred into an algal cell. In a preferred embodiment the exogenous genetic material includes a nucleic acid molecule having a sequence selected from the group consisting of SEQ ID NO: 1 through SEQ ID NO: 3519 or complements thereof.

[0084] The algal recombinant vector may be any vector which can be conveniently subjected to recombinant DNA procedures. The choice of a vector will typically depend on the compatibility of the vector with the algal host cell into which the vector is to be introduced. The vector may be a linear or a closed circular plasmid. The vector system may be a single vector or plasmid or two or more vectors or plasmids which together contain the total DNA to be introduced into the genome of the algal host.

[0085] The algal vector may be an autonomously replicating vector, i.e., a vector which exists as an extrachromosomal entity, the replication of which is independent of chromosomal replication, e.g., a plasmid, an extrachromosomal element, a minichromosome, or an artificial chromosome. The vector may contain any means for assuring self-replication. Alternatively, the vector may be one which, when introduced into the algal cell, is integrated into the genome and replicated together with the chromosome(s) into which it has been integrated. For integration, the vector may rely on the nucleic acid sequence of the vector for stable integration of the vector into the genome by homologous or nonhomologous recombination. Alternatively, the vector may contain additional nucleic acid sequences for directing integration by homologous recombination into the genome of the algal host. The additional nucleic acid sequences enable the vector to be integrated into the host cell genome at a precise location(s) in the chromosome(s). To increase the likelihood of integration at a precise location, there should be preferably two nucleic acid sequences which individually contain a sufficient number of nucleic acids, preferably 400 bp to 1500 bp, more preferably 800 bp to 1000 bp, which are highly homologous with the corresponding target sequence to enhance the probability of homologous recombination. These nucleic acid sequences may be any sequence that is homologous with a target sequence in the genome of the algal host cell, and, furthermore, may be non-encoding or encoding sequences.

[0086] The vectors of the present invention preferably contain one or more selectable markers which permit easy selection of transformed cells. A selectable marker is a gene, the product of which confers upon an algal cell resistance to a compound to which the algal would otherwise be sensitive. The compound can be selected from the group consisting of antibiotics, fungicides, herbicides, and heavy metals. The selectable marker may be selected from any known or subsequently identified selectable markers, including markers derived from algal, fungal, and bacterial sources. Preferred selectable markers can be selected from the group including, but not limited to, amdS (acetamidase), argB (ornithine carbamoyltransferase), bar (phosphinothricin acetyltransferase), ble (bleomycin binding protein), cat (chloramphenicol acetyltransferase), hygB (hygromycin B phosphotransferase), nat (nourseothricin acetyltransferase), niaD (nitrate reductase), neo (neomycin phosphotransferase), pac (puromycin acetyltransferase), pyrG (orotidine-5′-phosphate decarboxylase), sat (streptothricin acetyltransferase), sC (sulfate adenyltransferase), trpC (anthranilate synthase), and glyphosate resistant EPSPS genes. Furthermore, selection may be accomplished by co-transformation, e.g., as described in WO 91/17243, herein incorporated by reference in its entirety.

[0087] A nucleic acid sequence of the present invention may be operably linked to a suitable promoter sequence. The promoter sequence is a nucleic acid sequence which is recognized by the algal host cell for expression of the nucleic acid sequence. The promoter sequence contains transcription and translation control sequences which mediate the expression of the protein or fragment thereof.

[0088] A promoter may be any nucleic acid sequence which shows transcriptional activity in the algal host cell of choice and may be obtained from genes encoding polypeptides either homologous or heterologous to the host cell. Examples of suitable promoters for directing the transcription of a nucleic acid construct of the invention in an algal host are light harvesting protein promoters obtained from photosynthetic organisms, Chlorella virus methyltransferase promoters, CaMV 35 S promoter, PL promoter from bacteriophage λ, nopaline synthase promoter from the Ti plasmid of Agrobacterium tumefaciens, and bacterial trp promotor.

[0089] A protein or fragment thereof encoding nucleic acid molecule of the present invention may also be operably linked to a terminator sequence at its 3′ terminus. The terminator sequence may be native to the nucleic acid sequence encoding the protein or fragment thereof or may be obtained from foreign sources. Any terminator which is functional in the algal host cell of choice may be used in the present invention.

[0090] A protein or fragment thereof encoding nucleic acid molecule of the present invention may also be operably linked to a suitable leader sequence. A leader sequence is a nontranslated region of a mRNA which is important for translation by the algal host. The leader sequence is operably linked to the 5′ terminus of the nucleic acid sequence encoding the protein or fragment thereof. The leader sequence may be native to the nucleic acid sequence encoding the protein or fragment thereof or may be obtained from foreign sources. Any leader sequence which is functional in the algal host cell of choice may be used in the present invention.

[0091] A polyadenylation sequence may also be operably linked to the 3′ terminus of the nucleic acid sequence of the present invention. The polyadenylation sequence is a sequence which when transcribed is recognized by the algal host to add polyadenosine residues to transcribed mRNA. The polyadenylation sequence may be native to the nucleic acid sequence encoding the protein or fragment thereof or may be obtained from foreign sources. Any polyadenylation sequence which is functional in the algal host of choice may be used in the present invention.

[0092] To avoid the necessity of disrupting the cell to obtain the protein or fragment thereof, and to minimize the amount of possible degradation of the expressed protein or fragment thereof within the cell, it is preferred that expression of the protein or fragment thereof gives rise to a product secreted outside the cell. To this end, the protein or fragment thereof of the present invention may be linked to a signal peptide linked to the amino terminus of the protein or fragment thereof. A signal peptide is an amino acid sequence which permits the secretion of the protein or fragment thereof from the algal host into the culture medium. The signal peptide may be native to the protein or fragment thereof of the invention or may be obtained from foreign sources. The 5′ end of the coding sequence of the nucleic acid sequence of the present invention may inherently contain a signal peptide coding region naturally linked in translation reading frame with the segment of the coding region which encodes the secreted protein or fragment thereof. Alternatively, the 5′ end of the coding sequence may contain a signal peptide coding region which is foreign to that portion of the coding sequence which encodes the secreted protein or fragment thereof. The foreign signal peptide may be required where the coding sequence does not normally contain a signal peptide coding region. Alternatively, the foreign signal peptide may simply replace the natural signal peptide to obtain enhanced secretion of the desired protein or fragment thereof. Any signal peptide capable of permitting secretion of the protein or fragment thereof in an algal host of choice may be used in the present invention.

[0093] A protein or fragment thereof encoding nucleic acid molecule of the present invention may also be linked to a propeptide coding region. A propeptide is an amino acid sequence found at the amino terminus of a proprotein or proenzyme. Cleavage of the propeptide from the proprotein yields a mature biochemically active protein. The resulting polypeptide is known as a propolypeptide or proenzyme (or a zymogen in some cases). Propolypeptides are generally inactive and can be converted to mature active polypeptides by catalytic or autocatalytic cleavage of the propeptide from the propolypeptide or proenzyme. The propeptide coding region may be native to the protein or fragment thereof or may be obtained from foreign sources. The foreign propeptide coding region may be obtained from the Saccharomyces cerevisiae alpha-factor gene or Myceliophthora thermophila laccase gene (WO 95/33836, herein incorporated by reference in its entirety).

[0094] The procedures used to ligate the elements described above to construct the recombinant expression vector of the present invention are well known to one skilled in the art (see, for example, Sambrook, 2nd ed., et al., Molecular Cloning, A Laboratory Manual Cold Spring Harbor, N.Y., (1989), herein incorporated by reference in its entirety).

[0095] The present invention also relates to recombinant algal host cells produced by the methods of the present invention which are advantageously used with the recombinant vector of the present invention. The cell is preferably transformed with a vector comprising a nucleic acid sequence of the invention followed by integration of the vector into the host chromosome. The choice of algal host cells will to a large extent depend upon the gene encoding the protein or fragment thereof and its source.

[0096] Algal cells may be transformed by a variety of known techniques, including but not limit to, microprojectile bombardment, protoplast fusion, electroporation, microinjection, and vigorous agitation in the presence of glass beads. Suitable procedures for transformation of green algal host cells are described in EP 108 580, herein incorporated by reference in its entirety. A suitable method of transforming Chlorella species is described by Jarvis and Brown, Curr. Genet. 19: 317-321 (1991), herein incorporated by reference in its entirety. A suitable method of transforming cells of diatom Phaeodactylum tricornutum species is described in WO 97/39106, herein incorporated by reference in its entirety. Chlorophyll C-containing algae may be transformed using the procedures described in U.S. Pat. No. 5,661,017, herein incorporated by reference in its entirety.

[0097] The expressed protein or fragment thereof may be detected using methods known in the art that are specific for the particular protein or fragment. These detection methods may include the use of specific antibodies, formation of an enzyme product, or disappearance of an enzyme substrate. For example, if the protein or fragment thereof has enzymatic activity, an enzyme assay may be used. Alternatively, if polyclonal or monoclonal antibodies specific to the protein or fragment thereof are available, immunoassays may be employed using the antibodies to the protein or fragment thereof. The techniques of enzyme assay and immunoassay are well known to those skilled in the art.

[0098] The resulting protein or fragment thereof may be recovered by methods known in the arts. For example, the protein or fragment thereof may be recovered from the nutrient medium by conventional procedures including, but not limited to, centrifugation, filtration, extraction, spray-drying, evaporation, or precipitation. The recovered protein or fragment thereof may then be further purified by a variety of chromatographic procedures, e.g., ion exchange chromatography, gel filtration chromatography, affinity chromatography, or the like.

[0099] (e) Plant Constructs and Plant Transformants

[0100] Nucleic acid molecules of the present invention may be used in plant transformation or transfection. Exogenous genetic material may be transferred into a plant cell and the plant cell regenerated into a whole, fertile or sterile plant. Exogenous genetic material is any genetic material, whether naturally occurring or otherwise, from any source that is capable of being inserted into any organism. Such genetic material may be transferred into either monocotyledons and dicotyledons including but not limited to the plants, alfalfa, Arabidopsis, barley, Brassica, broccoli, cabbage, citrus, cotton, garlic, oat, oilseed rape, onion, canola, flax, maize, an ornamental plant, pea, peanut, pepper, potato, rice, rye, sorghum, soybean, strawberry, sugarcane, sugarbeet, tomato, wheat, poplar, pine, fir, eucalyptus, apple, lettuce, lentils, grape, banana, tea, turf grasses, sunflower, oil palm, Phaseolus etc. Particularly preferred plants to use for the transformation or transfection would include Arabidopsis, barley, cotton, oat, oilseed rape, rice, maize, soybean, canola, ornamentals, sugarcane, sugarbeet, tomato, potato, wheat and turf grasses (See specifically, Chistou, Particle Bombardment for Genetic Engineering of Plants, Biotechnology Intelligence Unit, Academic Press, San Diego, Calif. (1996), herein incorporated by reference in its entirety).

[0101] Transfer of a nucleic acid that encodes for a protein can result in overexpression of that protein in a transformed cell or transgenic plant One or more of the proteins or fragments thereof encoded by nucleic acid molecules of the present invention may be overexpressed in a transformed cell or transformed plant. Such overexpression may be the result of transient or stable transfer of the exogenous material. In a preferred embodiment of the present invention, one or more of the C. vulgaris homologue proteins or fragments is overexpressed in a transformed cell or transgenic plant.

[0102] Exogenous genetic material may be transferred into a plant cell by the use of a DNA vector or construct designed for such a purpose. Vectors have been engineered for transformation of large DNA inserts into plant genomes. Binary bacterial artificial chromosomes have been designed to replicate in both E. coli and A. tumefaciens and have all of the features required for transferring large inserts of DNA into plant chromosomes (Choi and Wing, http://genome.clemson.edu/protocols2-nj.html July, 1998). ApBACwich system has been developed to achieve site-directed integration of DNA into the genome. A 150 kb cotton BAC DNA is reported to have been transferred into a specific lox site in tobacco by biolistic bombardment and Cre-lox site specific recombination.

[0103] A construct or vector may also include a plant promoter to express the protein or protein fragment of choice. A number of promoters which are active in plant cells have been described in the literature. These include the nopaline synthase (NOS) promoter (Ebert et al., Proc. Natl. Acad. Sci. U.S.A. 84: 5745-5749 (1987), herein incorporated by reference in its entirety), the octopine synthase (OCS) promoter (which are carried on tumor-inducing plasmids of Agrobacterium tumefaciens), the caulimovirus promoters such as the cauliflower mosaic virus (CaMV) 19S promoter (Lawton et al., Plant Mol. Biol. 9:3 15-324 (1987), herein incorporated by reference in its entirety) and the CAMV 35S promoter (Odell et al., Nature 313: 810-812 (1985), herein incorporated by reference in its entirety), the figwort mosaic virus 35S-promoter, the light-inducible promoter from the small subunit of ribulose-1,5-bis-phosphate carboxylase (ssRUBISCO), the Adh promoter (Walker et al., Proc. Natl. Acad. Sci. U.S.A. 84: 6624-6628 (1987), herein incorporated by reference in its entirety), the sucrose synthase promoter (Yang et al., Proc. Natl. Acad. Sci. U.S.A. 87: 4144-4148 (1990), herein incorporated by reference in its entirety), the R gene complex promoter (Chandler et al., The Plant Cell 1: 1175-1183 (1989), herein incorporated by reference in its entirety), and the chlorophyll a/b binding protein gene promoter, etc. These promoters have been used to create DNA constructs which have been expressed in plants; see, e.g., PCT publication WO 84/02913, herein incorporated by reference in its entirety.

[0104] Promoters which are known or are found to cause transcription of DNA in plant cells can be used in the present invention. Such promoters may be obtained from a variety of sources such as plants and plant viruses. It is preferred that the particular promoter selected should be capable of causing sufficient expression to result in the production of an effective amount of protein to cause the desired phenotype. In addition to promoters which are known to cause transcription of DNA in plant cells, other promoters may be identified for use in the current invention by screening a plant cDNA library for genes which are selectively or preferably expressed in the target tissues or cells.

[0105] For the purpose of expression in source tissues of the plant, such as the leaf, seed, root or stem, it is preferred that the promoters utilized in the present invention have relatively high expression in these specific tissues. For this purpose, one may choose from a number of promoters for genes with tissue- or cell-specific or -enhanced expression. Examples of such promoters reported in the literature include the chloroplast glutamine synthetase GS2 promoter from pea (Edwards et al., Proc. Natl. Acad Sc. USA. 87: 3459-3463 (1990), herein incorporated by reference in its entirety), the chloroplast fructose-1,6-biphosphatase (FBPase) promoter from wheat (Lloyd et al., Mol. Gen. Genet. 225: 209-216 (1991), herein incorporated by reference in its entirety), the nuclear photosynthetic ST-LS1 promoter from potato (Stockhaus et al., EMBO J 8: 2445-2451 (1989), herein incorporated by reference in its entirety), the phenylalanine ammonia-lyase (PAL) promoter and the chalcone synthase (CHS) promoter from Arabidopsis thaliana. Also reported to be active in photosynthetically active tissues are the ribulose-1,5-bisphosphate carboxylase (RbcS) promoter from eastern larch (Larix laricina), the promoter for the cab gene, cab6, from pine (Yamamoto et al., Plant Cell Physiol. 35: 773-778 (1994), herein incorporated by reference in its entirety), the promoter for the Cab-1 gene from wheat (Fejes et al., Plant Mol. Biol. 15: 921-932 (1990), herein incorporated by reference in its entirety), the promoter for the CAB-1 gene from spinach (Lubberstedt et al., Plant Physiol. 104: 97-1006 (1994), herein incorporated by reference in its entirety), the promoter for the cab1 R gene from rice (Luan et al., Plant Cell. 4: 971-981 (1992), herein incorporated by reference in its entirety), the pyruvate, orthophosphate dikinase (PPDK) promoter from Zea mays (Matsuoka et al., Proc. Natl. Acad. Sci. USA. 90: 9586-9590 (1993), herein incorporated by reference in its entirety), the promoter for the tobacco Lhcb1*2 gene (Cerdan et al., Plant Mol. Biol. 33: 245-255. (1997), herein incorporated by reference in its entirety), the Arabidopsis thaliana SUC2 sucrose-H+ symporter promoter (Truernit et al., Planta. 196: 564-570 (1995), herein incorporated by reference in its entirety), and the promoter for the thylacoid membrane proteins from spinach (psaD, psaF, psaE, PC, FNR, atpC, atpD, cab, rbcS). Other promoters for the chlorophyl a/b-binding proteins may also be utilized in the present invention, such as the promoters for LhcB gene and PsbP gene from white mustard (Sinapis alba; Kretsch et al., Plant Mol. Biol. 28: 219-229 (1995), herein incorporated by reference in its entirety).

[0106] For the purpose of expression in sink tissues of the plant, such as the tuber of the potato plant, the fruit of tomato, or the seed of Zea mays, wheat, rice, and barley, it is preferred that the promoters utilized in the present invention have relatively high expression in these specific tissues. A number of promoters for genes with tuber-specific or -enhanced expression are known, including the class I patatin promoter (Bevan et al., EMBO J. 8: 1899-1906 (1986); Jefferson et al., Plant Mol. Biol. 14: 995-1006 (1990), both of which are herein incorporated by reference in its entirety), the promoter for the potato tuber ADPGPP genes, both the large and small subunits, the sucrose synthase promoter (Salanoubat and Belliard, Gene. 60: 47-56 (1987), Salanoubat and Belliard, Gene. 84: 181-185 (1989), both of which are herein incorporated by reference in their entirety), the promoter for the major tuber proteins including the 22 kd protein complexes and proteinase inhibitors (Hannapel, Plant Physiol. 101: 703-704 (1993), herein incorporated by reference in its entirety), the promoter for the granule bound starch synthase gene (GBSS) (Visser et al., Plant Mol. Biol. 17: 691-699 (1991), herein incorporated by reference in its entirety), and other class I and II patatins promoters (Koster-Topfer et al., Mol. Gen. Genet. 219: 390-396 (1989); Mignery et al., Gene. 62: 27-44 (1988), both of which are herein incorporated by reference in their entirety).

[0107] Other promoters can also be used to express a fructose 1,6 bisphosphate aldolase gene in specific tissues, such as seeds or fruits. The promoter for β-conglycinin (Chen et al, Dev. Genet. 10: 112-122 (1989), herein incorporated by reference in its entirety) or other seed-specific promoters such as the napin and phaseolin promoters, can be used. The zeins are a group of storage proteins found in Zea mays endosperm. Genomic clones for zein genes have been isolated (Pedersen et al., Cell 29: 1015-1026 (1982), herein incorporated by reference in its entirety), and the promoters from these clones, including the 15 kD, 16 kD, 19 kD, 22 kD, 27 kD, and gamma genes, could also be used. Other promoters known to function, for example, in Zea mays, include the promoters for the following genes: waxy, Brittle, Shrunken 2, Branching enzymes I and II, starch synthases, debranching enzymes, oleosins, glutelins, and sucrose synthases. A particularly preferred promoter for Zea mays endosperm expression is the promoter for the glutelin gene from rice, more particularly the Osgt-1 promoter (Zheng et al., Mol. Cell. Biol. 13: 5829-5842 (1993), herein incorporated by reference in its entirety). Examples of promoters suitable for expression in wheat include those promoters for the ADPglucose pyrophosphorylase (ADPGPP) subunits, the granule bound and other starch synthases, the branching and debranching enzymes, the embryogenesis-abundant proteins, the gliadins, and the glutenins. Examples of such promoters in rice include those promoters for the ADPGPP subunits, the granule bound and other starch synthases, the branching enzymes, the debranching enzymes, sucrose syntheses, and the glutelins. A particularly preferred promoter is the promoter for rice glutelin, Osgt-1. Examples of such promoters for barley include those for the ADPGPP subunits, the granule bound and other starch synthases, the branching enzymes, the debranching enzymes, sucrose synthases, the hordeins, the embryo globulins, and the aleurone specific proteins.

[0108] Root specific promoters may also be used. An example of such a promoter is the promoter for the acid chitinase gene (Samac et al., Plant Mol. Biol. 25: 587-596 (1994), herein incorporated by reference in its entirety). Expression in root tissue could also be accomplished by utilizing the root specific subdomains of the CaMV35S promoter that have been identified (Lam et al., Proc. Natl. Acad. Sci. USA. 86: 7890-7894 (1989), herein incorporated by reference in its entirety). Other root cell specific promoters include those reported by Conkling et al. (Conkling et al., Plant Physiol. 93: 1203-1211 (1990), herein incorporated by reference in its entirety).

[0109] Additional promoters that may be utilized are described, for example, in U.S. Pat. Nos. 5,378,619, 5,391,725, 5,428,147, 5,447,858, 5,608,144, 5,608,144, 5,614,399, 5,633,441, 5,633,435, and 4,633,436, all of which are herein incorporated by reference in their entirety. In addition, a tissue specific enhancer may be used (Fromm et al., The Plant Cell 1: 977-984 (1989), herein incorporated by reference in its entirety). It is further understood that one or more of the promoters of the present invention may be used.

[0110] Constructs or vectors may also include, with the coding region of interest, a nucleic acid sequence that acts, in whole or in part, to terminate transcription of that region. For example, such sequences have been isolated including the Tr7 3′ sequence and the nos 3′ sequence (Ingelbrecht et al., The Plant Cell 1: 671-680 (1989); Bevan et al., Nucleic Acids Res. 11: 369-385 (983), both of which are herein incorporated by reference in their entirety), or the like. It is understood that one or more sequences of the present invention that act, to terminate transcription may be used.

[0111] A vector or construct may also include other regulatory elements. Examples of such include the Adh intron 1 (Callis et al., Genes and Develop. 1: 1183-1200 (1987), herein incorporated by reference in its entirety), the sucrose synthase intron (Vasil et al., Plant Physiol. 91: 1575-1579 (1989), herein incorporated by reference in its entirety) and the TMV omega element (Gallie et al., The Plant Cell 1: 301-311 (1989), herein incorporated by reference in its entirety). These and other regulatory elements may be included when appropriate. It is also understood that one or more of the regulatory regions of the present invention may be used.

[0112] A vector or construct may also include a selectable marker. Selectable markers may also be used to select for plants or plant cells that contain the exogenous genetic material. Examples of such include, but are not limited to, a neo gene (Potrykus et al., Mol. Gen. Genet. 199: 183-188 (1985), herein incorporated by reference in its entirety) which codes for kanamycin resistance and can be selected for using kanamycin, G418, etc.; a bar gene which codes for bialaphos resistance; a mutant EPSP synthase gene (Hinchee et al., Bio/Technology 6: 915-922 (1988), herein incorporated by reference in its entirety) which encodes glyphosate resistance; a nitrilase gene which confers resistance to bromoxynil (Stalker et al., J. Biol. Chem. 263: 6310-6314 (1988), herein incorporated by reference in its entirety); a mutant acetolactate synthase gene (ALS) which confers imidazolinone or sulphonylurea resistance (European Patent Application 154,204 (Sep. 11, 1985), herein incorporated by reference in its entirety); and a methotrexate resistant DHFR gene (Thillet et al., J. Biol. Chem. 263: 12500-12508 (1988), herein incorporated by reference in its entirety).

[0113] A vector or construct may also include a transit peptide. Incorporation of a suitable chloroplast transit peptide may also be employed (European Patent Application Publication Number 0218571, herein incorporated by reference in its entirety). Translational enhancers may also be incorporated as part of the vector DNA. DNA constructs could contain one or more 5′ non-translated leader sequences which may serve to enhance expression of the gene products from the resulting mRNA transcripts. Such sequences may be derived from the promoter selected to express the gene or can be specifically modified to increase translation of the mRNA. Such regions may also be obtained from viral RNAs, from suitable eukaryotic genes, or from a synthetic gene sequence. For a review of optimizing expression of transgenes, see Koziel et al., Plant Mol. Biol. 32: 393405 (1996), herein incorporated by reference in its entirety.

[0114] A vector or construct may also include a screenable marker. Screenable markers may be used to monitor expression. Exemplary screenable markers include a O-glucuronidase or uidA gene (GUS) which encodes an enzyme for which various chromogenic substrates are known (Jefferson, Plant Mol. Biol, Rep. 5: 387405 (1987); Jefferson et al., EMBO J. 6: 3901-3907 (1987), both of which are herein incorporated by reference in their entirety); an R-locus gene, which encodes a product that regulates the production of anthocyanin pigments (red color) in plant tissues ((Dellaporta et al., Stadler Symposium 11: 263-282 (1988), herein incorporated by reference in its entirety); a β-lactamase gene (Sutcliffe et al., Proc. Natl. Acad. Sci. U.S.A. 75: 3737-3741 (1978), herein incorporated by reference in its entirety), a gene which encodes an enzyme for which various chromogenic substrates are known (e.g., PADAC, a chromogenic cephalosporin); a luciferase gene (Ow et al., Science 234: 856-859 (1986), herein incorporated by reference in its entirety) a xylE gene (Zukowsky et al., Proc. Natl. Acad. Sci. U.S.A. 80: 1101-1105 (1983), herein incorporated by reference in its entirety) which encodes a catechol diozygenase that can convert chromogenic catechols; an α-amylase gene (Ikatu et al., Bio/Technol. 8: 241-242 (1990), herein incorporated by reference in its entirety); a tyrosinase gene (Katz et al., J. Gen. Microbiol. 129: 2703-2714 (1983), herein incorporated by reference in its entirety) which encodes an enzyme capable of oxidizing tyrosine to DOPA and dopaquinone which in turn condenses to melanin; an α-galactosidase, which will turn a chromogenic α-galactose substrate.

[0115] Included within the terms “selectable or screenable marker genes” are also genes which encode a secretable marker whose secretion can be detected as a means of identifying or selecting for transformed cells. Examples include markers which encode a secretable antigen that can be identified by antibody interaction, or even secretable enzymes which can be detected catalytically. Secretable proteins fall into a number of classes, including small, diffusible proteins detectable, e.g., by ELISA, small active enzymes detectable in extracellular solution (e.g., α-amylase, β-lactamase, phosphinothricin transferase), or proteins which are inserted or trapped in the cell wall (such as proteins which include a leader sequence such as that found in the expression unit of extension or tobacco PR-S). Other possible selectable and/or screenable marker genes will be apparent to those of skill in the art.

[0116] There are many methods for introducing nucleic acid molecules into plant cells. Suitable methods are believed to include virtually any method by which nucleic acid molecules may be introduced into a cell, such as by Agrobacterium infection or direct delivery of nucleic acid molecules such as, for example, by PEG-mediated transformation, by electroporation or by acceleration of DNA coated particles, etc. (Potrykus, Ann. Rev. Plant Physiol. Plant Mol. Biol. 42: 205-225 (1991); Vasil, Plant Mol. Biol. 25: 925-937 (1994), both of which are herein incorporated by reference in their entirety). For example, electroporation has been used to transform Zea mays protoplasts (Fromm et al., Nature 312: 791-793 (1986), herein incorporated by reference in its entirety).

[0117] Other vector systems suitable for introducing transforming DNA into a host plant cell includes but is not limited to binary artificial chromosome (BIBAC) vectors (Hamilton et al., Gene 200:107-116, (1997), herein incorporated by reference in its entirety, and transfection with RNA viral vectors (Della-Cioppa et al., Ann. N.Y. Acad. Sci. (1996), 792 (Engineering Plants for Commercial Products and Applications), 57-61, herein incorporated by reference in its entirety.

[0118] Technology for introduction of DNA into cells is well known to those of skill in the art. Four general methods for delivering a gene into cells have been described: (1) chemical methods (Graham and van der Eb, Virology, 54: 536-539 (1973), herein incorporated by reference in its entirety); (2) physical methods such as microinjection (Capecchi, Cell 22: 479-488 (1980), herein incorporated by reference in its entirety), electroporation (Wong and Neumann, Biochem. Biophys. Res. Commun. 107: 584-587 (1982); Fromm et al., Proc. Natl. Acad. Sci. USA. 82: 5824-5828 (1985); U.S. Pat. No. 5,384,253, all of which are herein incorporated by reference in their entirety), and the gene gun (Johnston and Tang, Methods Cell Biol. 43: 353-365 (1994), herein incorporated by reference in its entirety); (3) viral vectors (Clapp, Clin. Perinatol. 20: 155-168 (1993); Lu et al., J. Exp. Med. 178: 2089-2096 (1993); Eglitis and Anderson, Biotechnique 6: 608-614 (1988), all of which the entirety are herein incorporated by reference); and (4) receptor-mediated mechanisms (Curiel et al., Hum. Gen. Ther. 3: 147-154 (1992); Wagner et al., Proc. Natl. Acad. Sci. U.S.A. 89: 6099-6103 (1992), all of which the entirety are herein incorporated by reference).

[0119] Acceleration methods that may be used include, for example, microprojectile bombardment and the like. One example of a method for delivering transforming nucleic acid molecules to plant cells is microprojectile bombardment. This method has been reviewed by Yang and Christou, eds., Particle Bombardment Technology for Gene Transfer, Oxford Press, Oxford, England (1994), herein incorporated by reference in its entirety). Non-biological particles (microprojectiles) that may be coated with nucleic acids and delivered into cells by a propelling force. Exemplary particles include those comprised of tungsten, gold, platinum, and the like.

[0120] A particular advantage of microprojectile bombardment, in addition to it being an effective means of reproducibly, and stably transforming monocotyledons, is that neither the isolation of protoplasts (Cristou et al., Plant Physiol. 87: 671-674 (1988), herein incorporated by reference in its entirety) nor the susceptibility of Agrobacterium infection is required. An illustrative embodiment of a method for delivering DNA into maize cells by acceleration is a biolistics-particle delivery system, which can be used to propel particles coated with DNA through a screen, such as a stainless steel or Nytex screen, onto a filter surface covered with corn cells cultured in suspension. Gordon-Kamm et al., describes the basic procedure for coating tungsten particles with DNA (Gordon-Kamm et al., Plant Cell 2: 603-618 (1990), herein incorporated by reference in its entirety). The screen disperses the tungsten nucleic acid particles so that they are not delivered to the recipient cells in large aggregates. A particle delivery system suitable for use with the present invention is the helium acceleration PDS-1000/He gun which is available from Bio-Rad Laboratories (Bio-Rad, Hercules, Calif.) (Sanford et al., Technique 3: 3-16 (1991), herein incorporated by reference in its entirety).

[0121] For the bombardment, cells in suspension may be concentrated on filters. Filters containing the cells to be bombarded are positioned at an appropriate distance below the microprojectile stopping plate. If desired, one or more screens are also positioned between the gun and the cells to be bombarded.

[0122] Alternatively; immature embryos or other target cells may be arranged on solid culture medium. The cells to be bombarded are positioned at an appropriate distance below the macroprojectile stopping plate. If desired, one or more screens are also positioned between the acceleration device and the cells to be bombarded. Through the use of techniques set forth herein one may obtain up to 1000 or more foci of cells transiently expressing a marker gene. The number of cells in a focus which express the exogenous gene product 48 hours post-bombardment often range from one to ten and average one to three.

[0123] In another alternative embodiment, plastids can be stably transformed. Methods suitable for plastid transformation in higher plants include particle gun delivery of DNA containing a selectable marker and targeting of the DNA to the plastid genome through homologous recombination (Svab et al. Proc. Natl. Acad. Sci. (U.S.A.) 87:8526-8530 (1990): Svab and Maliga Proc. Natl. Acad. Sci. (U.S.A.) 90:913-917 (1993); Staub and Maliga, P. EMBO J. 12:601-606 (1993), U.S. Pat. Nos. 5,451,513 and 5,545,818, all of which are herein incorporated by reference in their entirety).

[0124] In bombardment transformation, one may optimize the prebombardment culturing conditions and the bombardment parameters to yield the maximum numbers of stable transformants. Both the physical and biological parameters for bombardment are important in this technology. Physical factors are those that involve manipulating the DNA/microprojectile precipitate or those that affect the flight and velocity of either the macro- or microprojectiles. Biological factors include all steps involved in manipulation of cells before and immediately after bombardment, the osmotic adjustment of target cells to help alleviate the trauma associated with bombardment, and also the nature of the transforming DNA, such as linearized DNA or intact supercoiled plasmids. It is believed that pre-bombardment manipulations are especially important for successful transformation of immature embryos.

[0125] Accordingly, it is contemplated that one may wish to adjust various aspects of the bombardment parameters in small scale studies to fully optimize the conditions. One may particularly wish to adjust physical parameters such as gap distance, flight distance, tissue distance, and helium pressure. One may also minimize the trauma reduction factors by modifying conditions which influence the physiological state of the recipient cells and which may therefore influence transformation and integration efficiencies. For example, the osmotic state, tissue hydration and the subculture stage or cell cycle of the recipient cells may be adjusted for optimum transformation. The execution of other routine adjustments will be known to those of skill in the art in light of the present disclosure.

[0126] Agrobacterium-mediated transfer is a widely applicable system for introducing genes into plant cells because the DNA can be introduced into whole plant tissues, thereby bypassing the need for regeneration of an intact plant from a protoplast. The use of Agrobacterium-mediated plant integrating vectors to introduce DNA into plant cells is well known in the art. See, for example, the methods described (Fraley et al., Biotechnology 3: 629-635 (1985); Rogers et al., Meth Enzymol 153: 253-277 (1987), both of which are herein incorporated by reference in their entirety. Further, the integration of the Ti-DNA is a relatively precise process resulting in few rearrangements. The region of DNA to be transferred is defined by the border sequences, and intervening DNA is usually inserted into the plant genome as described (Spielmann et al., Mol. Gen. Genet. 205: 34 (1986), herein incorporated by reference in its entirety).

[0127] Modern Agrobacterium transformation vectors are capable of replication in E. coli as well as Agrobacterium, allowing for convenient manipulations as described (Klee et al., In: Plant DNA Infectious Agents, T. Hohn and J. Schell, eds., Springer-Verlag, New York, pp. 179-203 (1985), herein incorporated by reference in its entirety). Moreover, recent technological advances in vectors for Agrobacterium-mediated gene transfer have improved the arrangement of genes and restriction sites in the vectors to facilitate construction of vectors capable of expressing various polypeptide coding genes. The vectors described have convenient multi-linker regions flanked by a promoter and a polyadenylation site for direct expression of inserted polypeptide coding genes and are suitable for present purposes (Rogers et al., Meth. In Enzymol, 153: 253-277 (1987), herein incorporated by reference in its entirety). In addition, Agrobacterium containing both armed and disarmed Ti genes can be used for the transformations. In those plant strains where Agrobacterium-mediated transformation is efficient, it is the method of choice because of the facile and defined nature of the gene transfer.

[0128] A transgenic plant formed using Agrobacterium transformation methods typically contains a single gene on one chromosome. Such transgenic plants can be referred to as being heterozygous for the added gene. More preferred is a transgenic plant that is homozygous for the added structural gene; i.e., a transgenic plant that contains two added genes, one gene at the same locus on each chromosome of a chromosome pair. A homozygous transgenic plant can be obtained by sexually mating (selfing) an independent sergeant transgenic plant that contains a single added gene, germinating some of the seed produced and analyzing the resulting plants produced for the gene of interest.

[0129] It is also to be understood that two different transgenic plants can also be mated to produce offspring that contain two independently segregating added, exogenous genes. Selfing of appropriate progeny can produce plants that are homozygous for both added, exogenous genes that encoding a polypeptide of interest. Back-crossing to a parental plant and out-crossing with a non-transgenic plant are also contemplated, as is vegetative propagation.

[0130] The present invention also provides for parts of the plants of the present invention. Plant parts, without limitation, include seed, endosperm, ovule and pollen. In a particularly preferred embodiment of the present invention, the plant part is a seed.

[0131] Transformation of plant protoplasts can be achieved using methods based on calcium phosphate precipitation, polyethylene glycol treatment, electroporation, and combinations of these treatments. See for example (Potrykus et al., Mol. Gen. Genet. 205: 193-200 (1986); Lorz et al, Mol. Gen. Genet. 199: 178, (1985); Fromm et al, Nature 319: 791 (1986); Uchimiya et al., Mol. Gem Genet. 204:204 (1986); Callis et al., Genes and Development 1183 (1987); Marcotte et al., Nature 335:454 (1988), all of which are herein incorporated by reference in their entirety).

[0132] Application of these systems to different plant strains depends upon the ability to regenerate that particular plant strain from protoplasts. Illustrative methods for the regeneration of cereals from protoplasts are described (Fujimura et al., Plant Tissue Culture Letters 2: 74 (1985); Toriyama et al, Theor Appl. Genet. 205: 34 (1986); Yamada et al, Plant Cell Rep. 4: 85 (1986); Abdullah et al., Biotechnology 4: 1087 (1986), all of which are herein incorporated by reference in their entirety).

[0133] To transform plant strains that cannot be successfully regenerated from protoplasts, other ways to introduce DNA into intact cells or tissues can be utilized. For example, regeneration of cereals from immature embryos or explants can be effected as described (Vasil, Biotechnology 6: 397 (1988), herein incorporated by reference in its entirety). In addition, “particle gun” or high-velocity microprojectile technology can be utilized (Vasil et al., Bio/Technology 10: 667, (1992), herein incorporated by reference in its entirety).

[0134] Using the latter technology, DNA is carried through the cell wall and into the cytoplasm on the surface of small metal particles as described (Klein et al., Nature 328: 70 (1987); Klein et al., Proc. Natl. Acad Sci U.S.A. 85: 8502-8505 (1988); McCabe et al., Biotechnology 6:923 (1988), all of which are herein incorporated by reference in their entirety). The metal particles penetrate through several layers of cells and thus allow the transformation of cells within tissue explants.

[0135] Other methods of cell transformation can also be used and include but are not limited to introduction of DNA into plants by direct DNA transfer into pollen (Zhou et al., Mete Enzymol. 101: 433 (1983); Hess et al., Intern Rev. Cytol. 107:367 (1987); Luo et al, Plant Mol. Biol. Reporter 6: 165 (1988), all of which are herein incorporated by reference in their entirety), by direct injection of DNA into reproductive organs of a plant (Pena et al., Nature 325: 274 (1987), herein incorporated by reference in its entirety), or by direct injection of DNA into the cells of immature embryos followed by the rehydration of desiccated embryos (Neuhaus et al., Theor. Appl. Genet. 75: 30, (1987), herein incorporated by reference in its entirety).

[0136] The regeneration, development, and cultivation of plants from single plant protoplast transformants or from various transformed explants is well known in the art (Weissbach and Weissbach, In: Methods for Plant Molecular Biology, (Eds.), Academic Press, Inc. San Diego, Calif., (1988), herein incorporated by reference in its entirety). This regeneration and growth process typically includes the steps of selection of transformed cells, culturing those individualized cells through the usual stages of embryonic development through the rooted plantlet stage. Transgenic embryos and seeds are similarly regenerated. The resulting transgenic rooted shoots are thereafter planted in an appropriate plant growth medium such as soil.

[0137] The development or regeneration of plants containing the foreign, exogenous gene that encodes a protein of interest is well known in the art. Preferably, the regenerated plants are self-pollinated to provide homozygous transgenic plants, as discussed before. Otherwise, pollen obtained from the regenerated plants is crossed to seed-grown plants of agronomically important lines. Conversely, pollen from plants of these important lines is used to pollinate regenerated plants. A transgenic plant of the present invention containing a desired polypeptide is cultivated using methods well known to one skilled in the art.

[0138] There are a variety of methods for the regeneration of plants from plant tissue. The particular method of regeneration will depend on the starting plant tissue and the particular plant species to be regenerated.

[0139] Methods for transforming dicots, primarily by use of Agrobacterium tumefaciens, and obtaining transgenic plants have been published for cotton (U.S. Pat. No. 5,004,863, U.S. Pat. No. 5,159,135, U.S. Pat. No. 5,518,908, all of which are herein incorporated by reference in their entirety); soybean (U.S. Pat. No. 5,569,834, U.S. Pat. No. 5,416,011, McCabe et al., Biotechnology 6: 923 (1988), Christou et al., Plant Physiol. 87: 671-674 (1988), all of which are herein incorporated by reference in their entirety); Brassica (U.S. Pat. No. 5,463,174, herein incorporated by reference in its entirety); peanut (Cheng et al., Plant Cell Rep. 15: 653-657 (1996), McKently et al., Plant Cell Rep. 14: 699-703 (1995), all of which are herein incorporated by reference in their entirety); papaya (Yang et al., (1996), herein incorporated by reference in its entirety); pea (Grant et al., Plant Cell Rep. 15: 254-258, (1995), herein incorporated by reference in its entirety).

[0140] Transformation of monocotyledons using electroporation, particle bombardment, and Agrobacterium have also been reported. Transformation and plant regeneration have been achieved in asparagus (Bytebier et al., Proc. Natl. Acad. Sci. USA. 84: 5345, (1987), herein incorporated by reference in its entirety); barley (Wan and Lemaux, Plant Physiol 104: 37 (1994), herein incorporated by reference in its entirety); maize (Rhodes et al., Science 240: 204 (1988), Gordon-Kamm et al., Plant Cell 2: 603, (1990), Fromm et al., Bio/Technology 8: 833 (1990), Koziel et al., Bio/Technology 11: 194 (1993), Armstrong et al., Crop Science 35: 550-557 (1995), all of which are herein incorporated by reference in their entirety); oat (Somers et al., Bio/Technology 10: 1589 (1992), herein incorporated by reference in its entirety); orchardgrass (Horn et al., Plant Cell Rep. 7: 469 (1988), herein incorporated by reference in its entirety); rice (Toriyama et al., Theor Appl. Genet. 205: 34 (1986); Park et al., Plant Mol. Biol. 32: 1135-1148, (1996); Abedinia et al., Aust. J. Plant Physiol. 24:133-141, (1997); Zhang and Wu, Theor. Appl. Genet. 76: 835, (1988); Thang et al. Plant Cell Rep. 7: 379, (1988); Battraw and Hall, Plant Sci. 86: 191-202, (1992); Christou et al., Bio/Technology 9: 957, (1991), all of which are herein incorporated by reference in their entirety); sugarcane (Bower and Birch, Plant J 2: 409, (1992), herein incorporated by reference in its entirety); tall fescue (Wang et al., Bio/Technology 10:691 (1992), herein incorporated by reference in its entirety), and wheat (Vasil et al., Bio/Technology 10:667 (1992); U.S. Pat. No. 5,631,152, both of which are herein incorporated by reference in their entirety.

[0141] Assays for gene expression based on the transient expression of cloned nucleic acid constructs have been developed by introducing the nucleic acid molecules into plant cells by polyethylene glycol treatment, electroporation, or particle bombardment (Marcotte et al., Nature 335: 454-457 (1988); Marcotte et al., Plant Cell 1: 523-532 (1989); McCarty et al., Cell 66: 895-905 (1991); Hattori et al., Genes Dev. 6: 609-618 (1992); Goff et al., EMBO J. 9: 2517-2522 (1990), all of which are herein incorporated by reference in their entirety). Transient expression systems may be used to functionally dissect gene constructs (See generally, Mailga et al., Methods in Plant Molecular Biology, Cold Spring Harbor Press (1995), herein incorporated by reference in its entirety).

[0142] Any of the nucleic acid molecules of the present invention may be introduced into a plant cell in a permanent or transient manner in combination with other genetic elements such as vectors, promoters enhancers etc. Further any of the C. vulgaris gene homologue or fragment thereof homologies of the present invention may be introduced into a plant cell in a manner that allows for over expression of the protein or fragment thereof encoded by the nucleic acid molecule.

[0143] Antibodies have been expressed in plants (Hiatt et al., Nature 342: 76-78 (1989); Conrad and Fielder, Plant Mol. Biol. 26: 1023-1030 (1994), both of which are herein incorporated by reference in their entirety). Cytoplamsic expression of a scFv (single-chain Fv antibodies) has been reported to delay infection by artichoke mottled crinkle virus. Transgenic plants that express antibodies directed against endogenous proteins may exhibit a physiological effect (Philips et al., EMBO J. 16:4489-4496 (1997); Marion-Poll, Trends in Plant Science 2:447-448 (1997), both of which are herein incorporated by reference in their entirety). For example, expressed anti-abscisic antibodies reportedly result in a general perturbation of seed development (Philips et al., EMBO J. 16:4489-4496 (1997), herein incorporated by reference in its entirety).

[0144] Antibodies that are catalytic may also be expressed in plants (abzymes). The principle behind abzymes is that since antibodies may be raised against many molecules, this recognition ability can be directed toward generating antibodies that bind transition states to force a chemical reaction forward (Persidas, Nature Biotechnology 15: 1313-1315 (1997); Baca et al., Ann. Rev. Biophys. Biomol. Struct. 26: 461-493 (1997), both of which are herein incorporated by reference in their entirety). The catalytic abilities of abzymes may be enhanced by site directed mutagensis. Examples of abzymes are, for example, set forth in U.S. Pat. No. 5,658,753; U.S. Pat. No. 5,632,990; U.S. Pat. No. 5,631,137; U.S. Pat. No. 5,602,015; U.S. Pat. No. 5,559,538; U.S. Pat. No. 5,576,174; U.S. Pat. No. 5,500,358; U.S. Pat. No. 5,318,897; U.S. Pat. No. 5,298,409; U.S. Pat. No. 5,258,289 and U.S. Pat. No. 5,194,585, all of which are herein incorporated in their entirety.

[0145] It is understood that any of the antibodies of the present invention may be expressed in plants and that such expression can result in a physiological effect. It is also understood that any of the expressed antibodies may be catalytic.

[0146] (f) Fungal Constructs and Fungal Transformants

[0147] The present invention also relates to a fungal recombinant vector comprising exogenous genetic material. The present invention also relates to a fungal cell comprising a fungal recombinant vector. The present invention also relates to methods for obtaining a recombinant fungal host cell comprising introducing into a fungal host cell exogenous genetic material.

[0148] Exogenous genetic material may be transferred into a fungal cell. Exogenous genetic material is any genetic material, whether naturally occurring or otherwise, from any source that is capable of being inserted into any organism. In a preferred embodiment the exogenous genetic material includes a nucleic acid molecule having a sequence selected from the group consisting of SEQ ID NO: 1 through SEQ ID NO: 3519 or complements thereof.

[0149] The fungal recombinant vector may be any vector which can be conveniently subjected to recombinant DNA procedures. The choice of a vector will typically depend on the compatibility of the vector with the fungal host cell into which the vector is to be introduced. The vector may be a linear or a closed circular plasmid. The vector system may be a single vector or plasmid or two or more vectors or plasmids which together contain the total DNA to be introduced into the genome of the fungal host.

[0150] The fungal vector may be an autonomously replicating vector, i.e., a vector which exists as an extrachromosomal entity, the replication of which is independent of chromosomal replication, e.g., a plasmid, an extrachromosomal element, a minichromosome, or an artificial chromosome. The vector may contain any means for assuring self-replication. Alternatively, the vector may be one which, when introduced into the fungal cell, is integrated into the genome and replicated together with the chromosome(s) into which it has been integrated. For integration, the vector may rely on the nucleic acid sequence of the vector for stable integration of the vector into the genome by homologous or nonhomologous recombination. Alternatively, the vector may contain additional nucleic acid sequences for directing integration by homologous recombination into the genome of the fungal host. The additional nucleic acid sequences enable the vector to be integrated into the host cell genome at a precise location(s) in the chromosome(s). To increase the likelihood of integration at a precise location, there should be preferably two nucleic acid sequences which individually contain a sufficient number of nucleic acids, preferably 400 bp to 1500 bp, more preferably 800 bp to 1000 bp, which are highly homologous with the corresponding target sequence to enhance the probability of homologous recombination. These nucleic acid sequences may be any sequence that is homologous with a target sequence in the genome of the fungal host cell, and, furthermore, may be non-encoding or encoding sequences.

[0151] For autonomous replication, the vector may further comprise an origin of replication enabling the vector to replicate autonomously in the host cell in question. Examples of origin of replications for use in a yeast host cell are the 2 micron origin of replication and the combination of CEN3 and ARS 1. Any origin of replication may be used which is compatible with the fungal host cell of choice.

[0152] The vectors of the present invention preferably contain one or more selectable markers which permit easy selection of transformed cells. A selectable marker is a gene the product of which provides, for example biocide or viral resistance, resistance to heavy metals, prototrophy to auxotrophs, and the like. The selectable marker may be selected from the group including, but not limited to, amdS (acetamidase), argB (ornithine carbamoyltransferase), bar (phosphinothricin acetyltransferase), hygB (hygromycin phosphotransferase), niaD (nitrate reductase), pyrG (orotidine-5′-phosphate decarboxylase), and sC (sulfate adenyltransferase), and trpC (anthranilate synthase). Preferred for use in an Aspergillus cell are the amdS and pyrG markers of Aspergillus nidulans or Aspergillus oryzae and the bar marker of Streptomyces hygroscopicus. Furthermore, selection may be accomplished by cotransformation, e.g., as described in WO 91/17243, herein incorporated by reference in its entirety. A nucleic acid sequence of the present invention may be operably linked to a suitable promoter sequence. The promoter sequence is a nucleic acid sequence which is recognized by the fungal host cell for expression of the nucleic acid sequence. The promoter sequence contains transcription and translation control sequences which mediate the expression of the protein or fragment thereof.

[0153] A promoter may be any nucleic acid sequence which shows transcriptional activity in the fungal host cell of choice and may be obtained from genes encoding polypeptides either homologous or heterologous to the host cell. Examples of suitable promoters for directing the transcription of a nucleic acid construct of the invention in a filamentous fungal host are promoters obtained from the genes encoding Aspergillus oryzae TAKA amylase, Rhizomucor miehei aspartic proteinase, Aspergillus niger neutral alpha-amylase, Aspergillus niger acid stable alpha-amylase, Aspergillus niger or Aspergillus awamori glucoamylase (glaA), Rhizomucor miehei lipase, Aspergillus oryzae alkaline protease, Aspergillus oryzae triose phosphate isomerase, Aspergillus nidulans acetamidase, and hybrids thereof. In a yeast host, a useful promoter is the Saccharomyces cerevisiae enolase (eno-1) promoter. Particularly preferred promoters are the TAKA amylase, NA2-tpi (a hybrid of the promoters from the genes encoding Aspergillus niger neutral alpha-amylase and Aspergillus oryzae triose phosphate isomerase), and glaA promoters.

[0154] A protein or fragment thereof encoding nucleic acid molecule of the present invention may also be operably linked to a terminator sequence at its 3′ terminus. The terminator sequence may be native to the nucleic acid sequence encoding the protein or fragment thereof or may be obtained from foreign sources. Any terminator which is functional in the fungal host cell of choice may be used in the present invention, but particularly preferred terminators are obtained from the genes encoding Aspergillus oryzae TAKA amylase, Aspergillus niger glucoamylase, Aspergillus nidulans anthranilate synthase, Aspergillus niger alpha-glucosidase, and Saccharomyces cerevisiae enolase.

[0155] A protein or fragment thereof encoding nucleic acid molecule of the present invention may also be operably linked to a suitable leader sequence. A leader sequence is a non-translated region of a mRNA which is important for translation by the fungal host. The leader sequence is operably linked to the 5′ terminus of the nucleic acid sequence encoding the protein or fragment thereof. The leader sequence may be native to the nucleic acid sequence encoding the protein or fragment thereof or may be obtained from foreign sources. Any leader sequence which is functional in the fungal host cell of choice may be used in the present invention, but particularly preferred leaders are obtained from the genes encoding Aspergillus oryzae TAKA amylase and Aspergillus oryzae triose phosphate isomerase.

[0156] A polyadenylation sequence may also be operably linked to the 3′ terminus of the nucleic acid sequence of the present invention. The polyadenylation sequence is a sequence which when transcribed is recognized by the fungal host to add polyadenosine residues to transcribed mRNA. The polyadenylation sequence may be native to the nucleic acid sequence encoding the protein or fragment thereof or may be obtained from foreign sources. Any polyadenylation sequence which is functional in the fungal host of choice may be used in the present invention, but particularly preferred polyadenylation sequences are obtained from the genes encoding Aspergillus oryzae TAKA amylase, Aspergillus niger glucoamylase, Aspergillus nidulans anthranilate synthase, and Aspergillus niger alpha-glucosidase.

[0157] To avoid the necessity of disrupting the cell to obtain the protein or fragment thereof, and to minimize the amount of possible degradation of the expressed protein or fragment thereof within the cell, it is preferred that expression of the protein or fragment thereof gives rise to a product secreted outside the cell. To this end, the protein or fragment thereof of the present invention may be linked to a signal peptide linked to the amino terminus of the protein or fragment thereof. A signal peptide is an amino acid sequence which permits the secretion of the protein or fragment thereof from the fungal host into the culture medium. The signal peptide may be native to the protein or fragment thereof of the invention or may be obtained from foreign sources. The 5′ end of the coding sequence of the nucleic acid sequence of the present invention may inherently contain a signal peptide coding region naturally linked in translation reading frame with the segment of the coding region which encodes the secreted protein or fragment thereof. Alternatively, the 5′ end of the coding-sequence may contain a signal peptide coding region which is foreign to that portion of the coding sequence which encodes the secreted protein or fragment thereof. The foreign signal peptide may be required where the coding sequence does not normally contain a signal peptide coding region. Alternatively, the foreign signal peptide may simply replace the natural signal peptide to obtain enhanced secretion of the desired protein or fragment thereof. The foreign signal peptide coding region may be obtained from a glucoamylase or an amylase gene from an Aspergillus species, a lipase or proteinase gene from Rhizomucor miehei, the gene for the alpha-factor from Saccharomyces cerevisiae, or the calf preprochymosin gene. An effective signal peptide for fungal host cells is the Aspergillus oryzae TAKA amylase signal, Aspergillus niger neutral amylase signal, the Rhizomucor miehei aspartic proteinase signal, the Humicola lanuginosus cellulase signal, or the Rhizomucor miehei lipase signal. However, any signal peptide capable of permitting secretion of the protein or fragment thereof in a fungal host of choice may be used in the present invention.

[0158] A protein or fragment thereof encoding nucleic acid molecule of the present invention may also be linked to a propeptide coding region. A propeptide is an amino acid sequence found at the amino terminus of a proprotein or proenzyme. Cleavage of the propeptide from the proprotein yields a mature biochemically active protein. The resulting polypeptide is known as a propolypeptide or proenzyme (or a zymogen in some cases). Propolypeptides are generally inactive and can be converted to mature active polypeptides by catalytic or autocatalytic cleavage of the propeptide from the propolypeptide or proenzyme. The propeptide coding region may be native to the protein or fragment thereof or may be obtained from foreign sources. The foreign propeptide coding region may be obtained from the Saccharomyces cerevisiae alpha-factor gene or Myceliophthora thermophila laccase gene (WO 95/33836, herein incorporated by reference in its entirety).

[0159] The procedures used to ligate the elements described above to construct the recombinant expression vector of the present invention are well known to one skilled in the art (see, for example, Sambrook, 2nd ed., et al., Molecular Cloning, A Laboratory Manual Cold Spring Harbor, N.Y., (1989)).

[0160] The present invention also relates to recombinant fungal host cells produced by the methods of the present invention which are advantageously used with the recombinant vector of the present invention. The cell is preferably transformed with a vector comprising a nucleic acid sequence of the invention followed by integration of the vector into the host chromosome. The choice of fungal host cells will to a large extent depend upon the gene encoding the protein or fragment thereof and its source. The fungal host cell may be a yeast cell or a filamentous fungal cell.

[0161] “Yeast” as used herein includes Ascosporogenous yeast (Endomycetales), Basidiosporogenous yeast, and yeast belonging to the Fungi Imperfecti (Blastomycetes). The Ascosporogenous yeasts are divided into the families Spermophthoraceae and Saccharomycetaceae. The latter is comprised of four subfamilies, Schizosaccharonzycoideae (for example, genus Schizosaccharomyces), Nadsonioideae, Lipomycoideae, and Saccharomycoideae (for example, genera Pichia Kluyveromyces and Saccharomyces). The Basidiosporogenous yeasts include the genera Leucosporidim, Rhodosporidium, Sporidiobolus, Filobasidium, and Filobasidiella. Yeast belonging to the Fungi Imperfecti are divided into two families, Sporobolomycetaceae (for example, genera Sorobolomyces and Bullera) and Cryptococcaceae (for example, genus Candida). Since the classification of yeast may change in the future, for the purposes of this invention, yeast shall be defined as described in Biology and Activities of Yeast (Skinner et al., eds, Soc. App. Bacteriol. Symposium Series No. 9, (1980), herein incorporated by reference in its entirety). The biology of yeast and manipulation of yeast genetics are well known in the art (see, for example, Biochemistry and Genetics of Yeast, Bacil, Horecker, and Stopani, editors, 2nd edition, 1987; The Yeasts, Rose, and Harrison, editors, 2nd edition, (1987); and The Molecular Biology of the Yeast Saccharomyces, Strathern et al., editors, (1981), all of which are herein incorporated by reference in their entirety).

[0162] “Fungi” as used herein includes the phyla Ascomycota; Basidiomycota, Chytridiomycota, and Zygomycota (as defined by Hawksworth et al., In: Ainsworth and Bisby's Dictionary of The Fungi, 8th edition, 1995, CAB International, University Press, Cambridge, UK; herein incorporated by reference in its entirety) as well as the Oomycota (as cited in Hawksworth et al., In: Ainsworth and Bisby's Dictionary of The Fungi, 8th edition, 1995, CAB International, University Press, Cambridge, UK) and all mitosporic fungi (Hawksworth et al., In: Ainsworth and Bisby's Dictionary of The Fungi, 8th edition, 1995, CAB International, University Press, Cambridge, UK). Representative groups of Ascomycota include, for example, Neurospora, Eupenicillium (=Penicillium), Emericella (=Aspergillus), Eurotiun (=Aspergillus), and the true yeasts listed above. Examples of Basidiomycota include mushrooms, rusts, and smuts. Representative groups of Chytridiomycota include, for example, Allomyces, Blastocladiella, Coelomomyces, and aquatic fungi. Representative groups of Oomycota include, for example, Saprolegniomycetous aquatic fungi (water molds) such as Achlya. Examples of mitosporic fungi include Aspergillus, Penicilliun, Candida, and Alternaria. Representative groups of Zygomycota include, for example, Rhizopus and Mucor.

[0163] “Filamentous fungi” include all filamentous forms of the subdivision Eumycota and Oomycota (as defined by Hawksworth et al., In: Ainsworth and Bisby's Dictionary of The Fungi, 8th edition, 1995, CAB International, University Press, Cambridge, UK). The filamentous fungi are characterized by a vegetative mycelium composed of chitin, cellulose, glucan, chitosan, mannan, and other complex polysaccharides. Vegetative growth is by hyphal elongation and carbon catabolism is obligatory aerobic. In contrast, vegetative growth by yeasts such as Saccharomyces cerevisiae is by budding of a unicellular thallus and carbon catabolism may be fermentative.

[0164] In one embodiment, the fungal host cell is a yeast cell. In a preferred embodiment, the yeast host cell is a cell of the species of Candida, Kluyveromyces, Saccharomyces, Schizosaccharomyces, Pichia, and Yarrowia In a preferred embodiment, the yeast host cell is a Saccharomyces cerevisiae cell, a Saccharomyces carlsbergensis, Saccharomyces diastaticus cell, a Saccharomyces douglasii cell, a Saccharomyces kluyveri cell, a Saccharomyces norbensis cell, or a Saccharomyces oviformis cell. In another preferred embodiment, the yeast host cell is a Kluyveromyces lactis cell. In another preferred embodiment, the yeast host cell is a Yarrowia lipolytica cell.

[0165] In another embodiment, the fungal host cell is a filamentous fungal cell. In a preferred embodiment, the filamentous fungal host cell is a cell of the species of, but not limited to, Acremonium, Aspergillus, Fusarium, Humicola, Myceliophthora, Mucor, Neurospora, Penicillium, Thielavia, Tolypocladium, and Trichoderma. In a preferred embodiment, the filamentous fungal host cell is an Aspergillus cell. In another preferred embodiment, the filamentous fungal host cell is an Acremonium cell. In another preferred embodiment, the filamentous fungal host cell is a Fusarium cell. In another preferred embodiment, the filamentous fungal host cell is a Humicola cell. In another preferred embodiment, the filamentous fungal host cell is a Myceliophthora cell. In another even preferred embodiment, the filamentous fungal host cell is a Mucor cell. In another preferred embodiment, the filamentous fungal host cell is a Neurospora cell. In another preferred embodiment, the filamentous fungal host cell is a Penicillium cell. In another preferred embodiment, the filamentous fungal host cell is a Thielavia cell. In another preferred embodiment, the filamentous fungal host cell is a Tolypocladiun cell. In another preferred embodiment, the filamentous fungal host cell is a Trichoderma cell. In a preferred embodiment, the filamentous fungal host cell is an Aspergillus oryzae cell, an Aspergillus niger cell, an Aspergillus foetidus cell, or an Aspergillus japonicus cell. In another preferred embodiment, the filamentous fungal host cell is a Fusarium oxysporum cell or a Fusarium graminearum cell. In another preferred embodiment, the filamentous fungal host cell is a Humicola insolens cell or a Humicola lanuginosus cell. In another preferred embodiment, the filamentous fungal host cell is a Myceliophthora thermophila cell. In a most preferred embodiment, the filamentous fungal host cell is a Mucor miehei cell. In a most preferred embodiment, the filamentous fungal host cell is a Neurospora crassa cell. In a most preferred embodiment, the filamentous fungal host cell is a Penicillium purpurogenum cell. In another most preferred embodiment, the filamentous fungal host cell is a Thielavia terrestris cell. In another most preferred embodiment, the Trichoderma cell is a Trichoderma reesei cell, a Trichoderma viride cell, a Trichoderma longibrachiatum cell, a Trichoderma harzianum cell, or a Trichoderma koningii cell. In a particularly preferred embodiment, the fungal host cell is selected from an A. nidulans cell, an A. niger cell, an A. oryzae cell and an A. sojae cell. In a further particularly preferred embodiment, the fungal host cell is an A. nidulans cell.

[0166] The recombinant fungal host cells of the present invention may further comprise one or more sequences which encode one or more factors that are advantageous in the expression of the protein or fragment thereof, for example, an activator (e.g., a trans-acting factor), a chaperone, and a processing protease. The nucleic acids encoding one or more of these factors are preferably not operably linked to the nucleic acid encoding the protein or fragment thereof. An activator is a protein which activates transcription of a nucleic acid sequence encoding a polypeptide (Kudla et al., EMBO 9: 1355-1364 (1990); Jarai and Buxton, Current Genetics 26: 2238-244 (1994); Verdier, Yeast 6: 271-297 (1990), all of which are herein incorporated by reference in their entirety). The nucleic acid sequence encoding an activator may be obtained from the genes encoding Saccharomyces cerevisiae heme activator protein 1 (hap1), Saccharomyces cerevisiae galactose metabolizing protein 4 (gal4), and Aspergillus nidulans ammonia regulation protein (areA). For further examples, see Verdier, Yeast 6: 271-297 (1990); MacKenzie et al., Journal of Gen. Microbiol. 139: 2295-2307 (1993), both of which are herein incorporated by reference in their entirety). A chaperone is a protein which assists another protein in folding properly (Hard et al., TIBS 19: 20-25 (1994); Bergeron et al., TIBS 19: 124-128 (1994); Demolder et al., J. Biotechnology 32: 179-189 (1994); Craig, Science 260: 1902-1903 (1993); Gething and Sambrook, Nature 355: 3345 (1992); Puig and Gilbert, J. Biol. Chem. 269: 7764-7771 (1994); Wang and Tsou, FASEB Journal 7: 1515-11157 (1993); Robinson et al, Bio/Technology 1: 381-384 (1994), all of which are herein incorporated by reference in their entirety). The nucleic acid sequence encoding a chaperone may be obtained from the genes encoding Aspergillus oryzae protein disulphide isomerase, Saccharomyces cerevisiae calnexin, Saccharomyces cerevisiae BiP/GRP78, and Saccharomyces cerevisiae Hsp70. For further examples, see Gething and Sambrook, Nature 355: 3345 (1992); Hartl et al., TIBS 19: 20-25 (1994), both of which are herein incorporated by reference in their entirety. A processing protease is a protease that cleaves a propeptide to generate a mature biochemically active polypeptide (Enderlin and Ogrydziak, Yeast 10: 67-79 (1994); Fuller et al., Proc. Natl. Acad. Sci. (U.S.A.) 86: 1434-1438 (1989); Julius et al., Cell 37: 1075-1089 (1984); Julius et al., Cell 32: 839-852 (1983), all of which are incorporated by reference in their entirety). The nucleic acid sequence encoding a processing protease may be obtained from the genes encoding Aspergillus niger Kex2, Saccharomyces cerevisiae dipeptidylaminopeptidase, Saccharomyces cerevisiae Kex2, and Yarrowia lipolytica dibasic processing endoprotease (xpr6). Any factor that is functional in the fungal host cell of choice may be used in the present invention.

[0167] Fungal cells may be transformed by a process involving protoplast formation, transformation of the protoplasts, and regeneration of the cell wall in a manner known per se. Suitable procedures for transformation of Aspergillus host cells are described in EP 238 023 and Yelton et al., Proc. Natl. Acad. Sci. (U.S.A.) 81: 1470-1474 (1984), both of which are herein incorporated by reference in their entirety. A suitable method of transforming Fusarium species is described by Malardier et al., Gene 78: 147-156 (1989), herein incorporated by reference in its entirety. Yeast may be transformed using the procedures described by Becker and Guarente, In: Abelson and Simon, (eds.), Guide to Yeast Genetics and Molecular Biology, Methods Enzymol., Volume 194, pp 182-187, Academic Press, Inc., New York; Ito et al., J. Bacteriology 153: 163 (1983); Hinnen et al., Proc. Natl. Acad. Sci. (U.S.A.) 75: 1920, (1978), all of which are herein incorporated by reference in their entirety.

[0168] The present invention also relates to methods of producing the protein or fragment thereof comprising culturing the recombinant fungal host cells under conditions conducive for expression of the protein or fragment thereof. The fungal cells of the present invention are cultivated in a nutrient medium suitable for production of the protein or fragment thereof using methods known in the art For example, the cell may be cultivated by shake flask cultivation, small-scale or large-scale fermentation (including continuous, batch, fed-batch, or solid state fermentations) in laboratory or industrial fermentors performed in a suitable medium and under conditions allowing the protein or fragment thereof to be expressed and/or isolated. The cultivation takes place in a suitable nutrient medium comprising carbon and nitrogen sources and inorganic salts, using-procedures known in the art (see, e.g., Bennett, and LaSure, eds., More Gene Manipulations in Fungi, Academic Press, CA, (1991), herein incorporated by reference in its entirety). Suitable media are available from commercial suppliers or may be prepared according to published compositions (e.g., in catalogues of the American Type Culture Collection, Manassas, Va.). If the protein or fragment thereof is secreted into the nutrient medium, a protein or fragment thereof can be recovered directly from the medium. If the protein or fragment thereof is not secreted, it is recovered from cell lysates.

[0169] The expressed protein or fragment thereof may be detected using methods known in the art that are specific for the particular protein or fragment These detection methods may include the use of specific antibodies, formation of an enzyme product, or disappearance of an enzyme substrate. For example, if the protein or fragment thereof has enzymatic activity, an enzyme assay may be used. Alternatively, if polyclonal or monoclonal antibodies specific to the protein or fragment thereof are available, immunoassays may be employed using the antibodies to the protein or fragment thereof. The techniques of enzyme assay and immunoassay are well known to those skilled in the art.

[0170] The resulting protein or fragment thereof may be recovered by methods known in the arts For example, the protein or fragment thereof may be recovered from the nutrient medium by conventional procedures including, but not limited to, centrifugation, filtration, extraction, spray-drying, evaporation, or precipitation. The recovered protein or fragment thereof may then be further purified by a variety of chromatographic procedures, e.g., ion exchange chromatography, gel filtration chromatography, affinity chromatography, or the like.

[0171] (g) Mammalian Constructs and Transformed Mammalian Cells

[0172] The present invention also relates to methods for obtaining a recombinant mammalian host cell, comprising introducing into a mammalian host cell exogenous genetic material. The present invention also relates to a mammalian cell comprising a mammalian recombinant vector. The present invention also relates to methods for obtaining a recombinant mammalian host cell, comprising introducing into a mammalian cell exogenous genetic material.

[0173] Mammalian cell lines available as hosts for expression are known in the art and include many immortalized cell lines available from the American Type Culture Collection (ATCC, Manassas, Va.), such as HeLa cells, Chinese hamster ovary (CHO) cells, baby hamster kidney (BHK) cells, and a number of other cell lines. Suitable promoters for mammalian cells are also known in the art and include viral promoters such as that from Simian Virus 40 (SV40) (Fiers et al., Nature 273: 113 (1978), herein incorporated by reference in its entirety), Rous sarcoma virus (RSV), adenovirus (ADV), and bovine papilloma virus (BPV). Mammalian cells may also require terminator sequences and poly-A addition sequences. Enhancer sequences which increase expression may also be included, and sequences which promote amplification of the gene may also be desirable (for example methotrexate resistance genes).

[0174] Vectors suitable for replication in mammalian cells may include viral replicons, or sequences which insure integration of the appropriate sequences encoding HCV epitopes into the host genome. For example, another vector used to express foreign DNA is vaccinia virus. In this case, for example, a nucleic acid molecule encoding an C. vulgaris protein homologue or fragment thereof is inserted into the vaccinia genome. Techniques for the insertion of foreign DNA into the vaccinia virus genome are known in the art, and may utilize, for example, homologous recombination. Such heterologous DNA is generally inserted into a gene which is non-essential to the virus, for example, the thymidine kinase gene (tk), which also provides a selectable marker. Plasmid vectors that greatly facilitate the construction of recombinant viruses have been described (see, for example, Mackett et al, J Virol. 49: 857 (1984); Chakrabarti et al., Mol. Cell. Biol. 5: 3403 (1985); Moss, In: Gene Transfer Vectors For Mammalian Cells (Miller and Calos, eds., Cold Spring Harbor Laboratory, N.Y., p. 10, (1987); all of which are herein incorporated by reference in their entirety). Expression of the HCV polypeptide then occurs in cells or animals which are infected with the live recombinant vaccinia virus.

[0175] The sequence to be integrated into the mammalian sequence may be introduced into the primary host by any convenient means, which includes calcium precipitated DNA, spheroplast fusion, transformation, electroporation, biolistics, lipofection, microinjection, or other convenient means. Where an amplifiable gene is being employed, the amplifiable gene may serve as the selection marker for selecting hosts into which the amplifiable gene has been introduced. Alternatively, one may include with the amplifiable gene another marker, such as a drug resistance marker, e.g. neomycin resistance (G418 in mammalian cells), hygromycin in resistance etc., or an auxotrophy marker (HIS3, TRP1, LEU2, URA3, ADE2, LYS2, etc.) for use in yeast cells.

[0176] Depending upon the nature of the modification and associated targeting construct, various techniques may be employed for identifying targeted integration. Conveniently, the DNA may be digested with one or more restriction enzymes and the fragments probed with an appropriate DNA fragment which will identify the properly sized restriction fragment associated with integration.

[0177] One may use different promoter sequences, enhancer sequences, or other sequence which will allow for enhanced levels of expression in the expression host. Thus, one may combine an enhancer from one source, a promoter region from another source, a 5′-noncoding region upstream from the initiation methionine from the same or different source as the other sequences, and the like. One may provide for an intron in the non-coding region with appropriate splice sites or for an alternative 3′-untranslated sequence or polyadenylation site. Depending upon the particular purpose of the modification, any of these sequences may be introduced, as desired.

[0178] Where selection is intended, the sequence to be integrated will have with it a marker gene, which allows for selection. The marker gene may conveniently be downstream from the target gene and may include resistance to a cytotoxic agent, e.g. antibiotics, heavy metals, or the like, resistance or susceptibility to HAT, gancyclovir, etc., complementation to an auxotrophic host, particularly by using an auxotrophic yeast as the host for the subject manipulations, or the like. The marker gene may also be on a separate DNA molecule, particularly with primary mammalian cells. Alternatively, one may screen the various transformants, due to the high efficiency of recombination in yeast, by using hybridization analysis, PCR, sequencing, or the like.

[0179] For homologous recombination, constructs can be prepared where the amplifiable gene will be flanked, normally on both sides with DNA homologous with the DNA of the target region. Depending upon the nature of the integrating DNA and the purpose of the integration, the homologous DNA will generally be within 100 kb, usually 50 kb, preferably about 25 kb, of the transcribed region of the target gene, more preferably within 2 kb of the target gene. Where modeling of the gene is intended, homology will usually be present proximal to the site of the mutation. By gene is intended the coding region and those sequences required for transcription of a mature mRNA. The homologous DNA may include the 5′-upstream region outside of the transcriptional regulatory region or comprising any enhancer sequences, transcriptional initiation sequences, adjacent sequences, or the like. The homologous region may include a portion of the coding region, where the coding region may be comprised only of an open reading frame or combination of exons and introns. The homologous region may comprise all or a portion of an intron, where all or a portion of one or more exons may also be present. Alternatively, the homologous region may comprise the 3′-region, so as to comprise all or a portion of the transcriptional termination region, or the region 3′ of this region. The homologous regions may extend over all or a portion of the target gene or be outside the target gene comprising all or a portion of the transcriptional regulatory regions and/or the structural gene.

[0180] The integrating constructs may be prepared in accordance with conventional ways, where sequences may be synthesized, isolated from natural sources, manipulated, cloned, ligated, subjected to in vitro mutagenesis, primer repair, or the like. At various stages, the joined sequences may be cloned, and analyzed by restriction analysis, sequencing, or the like. Usually during the preparation of a construct where various fragments are joined, the fragments, intermediate constructs and constructs will be carried on a cloning vector comprising a replication system functional in a prokaryotic host, e.g., E. coli, and a marker for selection, e.g., biocide resistance, complementation to an auxotrophic host, etc. Other functional sequences may also be present, such as polylinkers, for ease of introduction and excision of the construct or portions thereof, or the like. A large number of cloning vectors are available such as pBR322, the pUC series, etc. These constructs may then be used for integration into the primary mammalian host.

[0181] In the case of the primary mammalian host, a replicating vector may be used. Usually, such vector will have a viral replication system, such as SV40, bovine papilloma virus, adenovirus, or the like. The linear DNA sequence vector may also have a selectable marker for identifying transfected cells. Selectable markers include the neo gene, allowing for selection with G418, the herpes tk gene for selection with HAT medium, the gpt gene with mycophenolic acid, complementation of an auxotrophic host, etc.

[0182] The vector may or may not be capable of stable maintenance in the host. Where the vector is capable of stable maintenance, the cells will be screened for homologous integration of the vector into the genome of the host, where various techniques for curing the cells may be employed. Where the vector is not capable of stable maintenance, for example, where a temperature sensitive replication system is employed, one may change the temperature from the permissive temperature to the non-permissive temperature, so that the cells may be cured of the vector. In this case, only those cells having integration of the construct comprising the amplifiable gene and, when present, the selectable marker, will be able to survive selection.

[0183] Where a selectable marker is present, one may select for the presence of the targeting construct by means of the selectable marker. Where the selectable marker is not present, one may select for the presence of the construct by the amplifiable gene. For the neo gene or the herpes tk gene, one could employ a medium for growth of the transformants of about 0.1-1 mg/ml of G418 or may use HAT medium, respectively. Where DHFR is the amplifiable gene, the selective medium may include from about 0.01-0.5 mu M of methotrexate or be deficient in glycine-hypoxanthine-thymidine and have dialysed serum (GHT media).

[0184] The DNA can be introduced into the expression host by a variety of techniques that include calcium phosphate/DNA co-precipitates, microinjection of DNA into the nucleus, electroporation, yeast protoplast fusion with intact cells, transfection, polycations, e.g., polybrene, polyornithine, etc., or the like. The DNA may be single or double stranded DNA, linear or circular. The various techniques for transforming mammalian cells are well known (see Keown et al., Methods Enzymol. (1989), Keown et al., Methods Enzymol. 185:527-537 (1990); Mansour et al., Nature 336:348-352, (1988); all of which are herein incorporated by reference in their entirety).

[0185] (h) Insect Constructs and Transformed Insect Cells

[0186] The present invention also relates to an insect recombinant expression vectors comprising exogenous genetic material. The present invention also relates to an insect cell comprising an insect recombinant vector. The present invention also relates to methods for obtaining a recombinant insect host cell, comprising introducing into an insect cell exogenous genetic material.

[0187] The insect recombinant vector may be any vector which can be conveniently subjected to recombinant DNA procedures and can bring about the expression of the nucleic acid sequence. The choice of a vector will typically depend on the compatibility of the vector with the insect host cell into which the vector is to be introduced. The vector may be a linear or a closed circular plasmid. The vector system may be a single vector or plasmid or two or more vectors or plasmids which together contain the total DNA to be introduced into the genome of the insect host. In addition, the insect vector may be an expression vector. Nucleic acid molecules can be suitable inserted into a replication vector for expression in the insect cell under a suitable promoter for insect cells. Many vectors are available for this purpose, and selection of the appropriate vector will depend mainly on the size of the nucleic acid molecule to be inserted into the vector and the particular host cell to be transformed with the vector. Each vector contains various components depending on its function (amplification of DNA or expression of DNA) and the particular host cell with which it is compatible. The vector components for insect cell transformation generally include, but not limited to, one or more of the following: a signal sequence, and origin of replication, one or more marker genes, and an inducible promoter.

[0188] The insect vector may be an autonomously replicating vector, i.e., a vector which exists as an extrachromosomal entity, the replication of which is independent of chromosomal replication, e.g., a plasmid, an extrachromosomal element, a minichromosome, or an artificial chromosome. The vector may contain any means for assuring self-replication. Alternatively, the vector may be one which, when introduced into the insect cell, is integrated into the genome and replicated together with the chromosome(s) into which it has been integrated. For integration, the vector may rely on the nucleic acid sequence of the vector for stable integration of the vector into the genome by homologous or nonhomologous recombination. Alternatively, the vector may contain additional nucleic acid sequences for directing integration by homologous recombination into the genome of the insect host. The additional nucleic acid sequences enable the vector to be integrated into the host cell genome at a precise location(s) in the chromosome(s). To increase the likelihood of integration at a precise location, there should be preferably two nucleic acid sequences which individually contain a sufficient number of nucleic acids, preferably 400 bp to 1500 bp, more preferably 800 bp to 1000 bp, which are highly homologous with the corresponding target sequence to enhance the probability of homologous recombination. These nucleic acid sequences may be any sequence that is homologous with a target sequence in the genome of the insect host cell, and, furthermore, may be non-encoding or encoding sequences.

[0189] Baculovirus expression vectors (BEVs) have become important tools for the expression of foreign genes, both for basic research and for the production of proteins with direct clinical applications in human and veterinary medicine (Doerfler, Curr. Top. Microbiol. Immunol. 131: 51-68 (1968); Luckow and Summers, Bio/Technology 6: 47-55 (1988a); Miller, Annual Review of Microbiol. 42: 177-199 (1988); Summers, Curr. Comm. Molecular Biology, Cold Spring Harbor Press, Cold Spring Harbor, N.Y. (1988); all of which are herein incorporated by reference in their entirety). BEVs are recombinant insect viruses in which the coding sequence for a chosen foreign gene has been inserted behind a baculovirus promoter in place of the viral gene, e.g., polyhedrin (Smith and Summers, U.S. Pat. No. 4,745,051, herein incorporated by reference in its entirety).

[0190] The use of baculovirus vectors relies upon the host cells being derived from Lepidopteran insects such as Spodoptera frugiperda or Trichoplusia ni. The preferred Spodoptera frugiperda cell line is the cell line Sf9. The Spodoptera frugiperda Sf9 cell line was obtained from American Type Culture Collection (Manassas, Va.) and is assigned accession number ATCC CRL 1711 (Summers and Smith, A Manual of Methods for Baculovirus Vectors and Insect Cell Culture Procedures, Texas Ag. Exper. Station Bulletin No. 1555 (1988), herein incorporated by reference in its entirety). Other insect cell systems, such as the silkworm B. mori may also be used.

[0191] The proteins expressed by the BEVs are, therefore, synthesized, modified and transported in host cells derived from Lepidopteran insects. Most of the genes that have been inserted and produced in the baculovirus expression vector system have been derived from vertebrate species. Other baculovirus genes in addition to the polyhedrin promoter may be employed to advantage in a baculovirus expression system. These include immediate-early (alpha), delayed-early (beta), late (gamma), or very late (delta), according to the phase of the viral infection during which they are expressed. The expression of these genes occurs sequentially, probably as the result of a “cascade” mechanism of transcriptional regulation. (Guarino and Summers, J. Virol. 57:563-571 (1986); Guarino and Summers, J. Virol. 61:2091-2099 (1987); Guarino and Summers, Virol. 162:444-451 (1988); all of which are herein incorporated by reference in their entirety).

[0192] Insect recombinant vectors are useful as an intermediates for the infection or transformation of insect cell systems. For example, an insect recombinant vector containing a nucleic acid molecule encoding a baculovirus transcriptional promoter followed downstream by an insect signal DNA sequence is capable of directing the secretion of the desired biologically active protein from the insect cell. The vector may utilize a baculovirus transcriptional promoter region derived from any of the over 500 baculoviruses generally infecting insects, such as for example the Orders Lepidoptera, Diptera, Orthoptera, Coleoptera and Hymenoptera, including for example but not limited to the viral DNAs of Autographa californica MNPV, Bombyx mori NPV, Trichoplusia ni MNPV, Rachiplusia ou MNPV or Galleria mellonella MNPV, wherein said baculovirus transcriptional promoter is a baculovirus immediate-early gene IE1 or IEN promoter; an immediate-early gene in combination with a baculovirus delayed-early gene promoter region selected from the group consisting of 39K and a HindIII-k fragment delayed-early gene; or a baculovirus late gene promoter. The immediate-early or delayed-early promoters can be enhanced with transcriptional enhancer elements. The insect signal DNA sequence may code for a signal peptide of a Lepidopteran adipokinetic hormone precursor or a signal peptide of the Manduca sexta adipokinetic hormone precursor (Summers, U.S. Pat. No. 5,155,037; herein incorporated by reference in its entirety). Other insect signal DNA sequences include a signal peptide of the Orthoptera Schistocerca gregaria locust adipokinetic hormone precurser and the Drosophila melanogaster cuticle genes CP1, CP2, CP3 or CP4 or for an insect signal peptide having substantially a similar chemical composition and function (Summers, U.S. Pat. No. 5,155,037).

[0193] Insect cells are distinctly different from animal cells. Insects have a unique life cycle and have distinct cellular properties such as the lack of intracellular plasminogen activators in insect cells which are present in vertebrate cells. Another difference is the high expression levels of protein products ranging from 1 to greater than 500 mg/liter and the ease at which cDNA can be cloned into cells (Frasier, In Vitro Cell. Dev. Biol. 25:225 (1989); Summers and Smith, In: A Manual of Methods for Baculovirus Vectors and Insect Cell Culture Procedures, Texas Ag. Exper. Station Bulletin No. 1555 (1988), both of which are incorporated by reference in their entirety).

[0194] Recombinant protein expression in insect cells is achieved by viral infection or stable transformation. For viral infection, the desired gene is cloned into bacuilovirus at the site of the wild-type polyhedron gene (Webb and Summers, Technique 2:173 (1990); Bishop and Posse, Adv. Gene Technol. 1:55 (1990); both of which are incorporated by reference in their entirety). The polyhedron gene is a component of a protein coat in occlusions which encapsulate virus particles. Deletion or insertion in the polyhedron gene results the failure to form occlusion bodies. Occlusion negative viruses are morphologically different from occlusion positive viruses and enable one skilled in the art to identify and purify recombinant viruses.

[0195] The vectors of present invention preferably contain one or more selectable markers which permit easy selection of transformed cells. A selectable marker is a gene the product of which provides, for example biocide or viral resistance, resistance to heavy metals, prototrophy to auxotrophs, and the like. Selection may be accomplished by co-transformation, e.g., as described in WO 91/17243, a nucleic acid sequence of the present invention may be operably linked to a suitable promoter sequence. The promoter sequence is a nucleic acid sequence which is recognized by the insect host cell for expression of the nucleic acid sequence. The promoter sequence contains transcription and translation control sequences which mediate the expression of the protein or fragment thereof. The promoter may be any nucleic acid sequence which-shows transcriptional activity in the insect host cell of choice and may be obtained from genes encoding polypeptides either homologous or heterologous to the host cell.

[0196] For example, a nucleic acid molecule encoding a C. vulgaris protein homologue or fragment thereof may also be operably linked to a suitable leader sequence. A leader sequence is a non-translated region of a mRNA which is important for translation by the insect host. The leader sequence is operably linked to the 5′ terminus of the nucleic acid sequence encoding the protein or fragment thereof. The leader sequence may be native to the nucleic acid sequence encoding the protein or fragment thereof or may be obtained from foreign sources. Any leader sequence which is functional in the insect host cell of choice may be used in the present invention.

[0197] A polyadenylation sequence may also be operably linked to the 3′ terminus of the nucleic acid sequence of the present invention. The polyadenylation sequence is a sequence which when transcribed is recognized by the insect host to add polyadenosine residues to transcribed mRNA. The polyadenylation sequence may be native to the nucleic acid sequence encoding the protein or fragment thereof or may be obtained from foreign sources. Any polyadenylation sequence which is functional in the fungal host of choice may be used in the present invention.

[0198] To avoid the necessity of disrupting the cell to obtain the protein or fragment thereof, and to minimize the amount of possible degradation of the expressed polypeptide within the cell, it is preferred that expression of the polypeptide gene gives rise to a product secreted outside the cell. To this end, the protein or fragment thereof of the present invention may be linked to a signal peptide linked to the amino terminus of the protein or fragment thereof. A signal peptide is an amino acid sequence which permits the secretion of the protein or fragment thereof from the insect host into the culture medium. The signal peptide may be native to the protein or fragment thereof of the invention or may be obtained from foreign sources. The 5′ end of the coding sequence of the nucleic acid sequence of the present invention may inherently contain a signal peptide coding region naturally linked in translation reading frame with the segment of the coding region which encodes the secreted protein or fragment thereof.

[0199] At present, a mode of achieving secretion of a foreign gene product in insect cells is by way of the foreign gene's native signal peptide. Because the foreign genes are usually from non-insect organisms, their signal sequences may be poorly recognized by insect cells, and hence, levels of expression may be suboptimal. However, the efficiency of expression of foreign gene products seems to depend primarily on the characteristics of the foreign protein. On average, nuclear localized or non-structural proteins are most highly expressed, secreted proteins are intermediate, and integral membrane proteins are the least expressed. One factor generally affecting the efficiency of the production of foreign gene products in a heterologous host system is the presence of native signal sequences (also termed presequences, targeting signals, or leader sequences) associated with the foreign gene. The signal sequence is generally coded by a DNA sequence immediately following (5′ to 3) the translation start site of the desired foreign gene.

[0200] The expression dependence on the type of signal sequence associated with a gene product can be represented by the following example: If a foreign gene is inserted at a site downstream from the translational start site of the baculovirus polyhedrin gene so as to produce a fusion protein (containing the N-terminus of the polyhedrin structural gene), the fused gene is highly expressed. But less expression is achieved when a foreign gene is inserted in a baculovirus expression vector immediately following the transcriptional start site and totally replacing the polyhedrin structural gene.

[0201] Insertions into the region −50 to −1 significantly alter (reduce) steady state transcription which, in turn, reduces translation of the foreign gene product. Use of the pVL941 vector optimizes transcription of foreign genes to the level of the polyhedrin gene transcription. Even though the transcription of a foreign gene may be optimal, optimal translation may vary because of several factors involving processing: signal peptide recognition, mRNA and ribosome binding, glycosylation, disulfide bond formation, sugar processing, oligomerization, for example.

[0202] The properties of the insect signal peptide are expected to be more optimal for the efficiency of the translation process in insect cells than those from vertebrate proteins. This phenomenon can generally be explained by the fact that proteins secreted from cells are synthesized as precursor molecules containing hydrophobic N-terminal signal peptides. The signal peptides direct transport of the select protein to its target membrane and are then cleaved by a peptidase on the membrane, such as the endoplasmic reticulum, when the protein passes through it.

[0203] Another exemplary insect signal sequence is the sequence encoding for Drosophila cuticle proteins such as CP1, CP2, CP3 or CP4 (Summers, U.S. Pat. No. 5,278,050; herein incorporated by reference in its entirety). Most of the 9 kb region of the Drosophila genome contains genes for the cuticle proteins has been sequenced. Four of the five cuticle genes contain a signal peptide coding sequence interrupted by a short intervening sequence (about 60 base pairs) at a conserved site. Conserved sequences occur in the 5′ mRNA untranslated region, in the adjacent 35 base pairs of upstream flanking sequence and at −200 base pairs from the mRNA start position in each of the cuticle genes.

[0204] Standard methods of insect cell culture, cotransfection and preparation of plasmids are set forth in Summers and Smith (Summers and Smith, A Manual of Methods for Baculovirus Vectors and Insect Cell Culture Procedures, Texas Agricultural Experiment Station Bulletin No. 1555, Texas A&M University (1987)). Procedures for the cultivation of viruses and cells are described in Volkman and Summers, J Virol 19: 820-832 (1975) and Volkman et al., J. Virol 19: 820-832 (1976); both of which are herein incorporated by reference in their entirety.

[0205] (i) Bacterial Constructs and Transformed Bacterial Cells

[0206] The present invention also relates to a bacterial recombinant vector comprising exogenous genetic material. The present invention also relates to a bacteria cell comprising a bacterial recombinant vector. The present invention also relates to methods for obtaining a recombinant bacteria host cell, comprising introducing into a bacterial host cell exogenous genetic material.

[0207] The bacterial recombinant vector may be any vector which can be conveniently subjected to recombinant DNA procedures. The choice of a vector will typically depend on the compatibility of the vector with the bacterial host cell into which the vector is to be introduced. The vector may be a linear or a closed circular plasmid. The vector system may be a single vector or plasmid or two or more vectors or plasmids which together contain the total DNA to be introduced into the genome of the bacterial host. In addition, the bacterial vector may be an expression vector. Nucleic acid molecules encoding C. vulgaris protein homologues or fragments thereof can, for example, be suitably inserted into a replicable vector for expression in the bacterium under the control of a suitable promoter for bacteria Many vectors are available for this purpose, and selection of the appropriate vector will depend mainly on the size of the nucleic acid to be inserted into the vector and the particular host cell to be transformed with the vector. Each vector contains various components depending on its function (amplification of DNA or expression of DNA) and the particular host cell with which it is compatible. The vector components for bacterial transformation generally include, but are not limited to, one or more of the following: a signal sequence, an origin of replication, one or more marker genes, and an inducible promoter.

[0208] In general, plasmid vectors containing replicon and control sequences that are derived from species compatible with the host cell are used in connection with bacterial hosts. The vector ordinarily carries a replication site, as well as marking sequences that are capable of providing phenotypic selection in transformed cells. For example, E. coli is typically transformed using pBR322, a plasmid derived from an E. coli species (see, e.g., Bolivar et al., Gene 2: 95 (1977); herein incorporated by reference in its entirety). pBR322 contains genes for ampicillin and tetracycline resistance and thus provides easy means for identifying transformed cells. The pBR322 plasmid, or other microbial plasmid or phage, also generally contains, or is modified to contain, promoters that can be used by the microbial organism for expression of the selectable marker genes.

[0209] Nucleic acid molecules encoding C. vulgaris protein homologues or fragments thereof may be expressed not only directly, but also as a fusion with another polypeptide, preferably a signal sequence or other polypeptide having a specific cleavage site at the N-terminus of the mature polypeptide. In general, the signal sequence may be a component of the vector, or it may be a part of the polypeptide DNA that is inserted into the vector. The heterologous signal sequence selected should be one that is recognized and processed (i.e., cleaved by a signal peptidase) by the host cell. For bacterial host cells that do not recognize and process the native polypeptide signal sequence, the signal sequence is substituted by a bacterial signal sequence selected, for example, from the group consisting of the alkaline phosphatase, penicillinase, lpp, or heat-stable enterotoxin II leaders.

[0210] Both expression and cloning vectors contain a nucleic acid sequence that enables the vector to replicate in one or more selected host cells. Generally, in cloning vectors this sequence is one that enables the vector to replicate independently of the host chromosomal DNA, and includes origins of replication or autonomously replicating sequences. Such sequences are well known for a variety of bacteria The origin of replication from the plasmid pBR322 is suitable for most Gram-negative bacteria.

[0211] Expression and cloning vectors also generally contain a selection gene, also termed a selectable marker. This gene encodes a protein necessary for the survival or growth of transformed host cells grown in a selective culture medium. Host cells not transformed with the vector containing the selection gene will not survive in the culture medium. Typical selection genes encode proteins that (a) confer resistance to antibiotics or other toxins, e.g., ampicillin, neomycin, methotrexate, or tetracycline, (b) complement auxotrophic deficiencies, or (c) supply critical nutrients not available from complex media, e.g., the gene encoding D-alanine racemase for Bacilli. One example of a selection scheme utilizes a drug to arrest growth of a host cell. Those cells that are successfully transformed with a heterologous gene homologue or fragment thereof produce a protein conferring drug resistance and thus survive the selection regimen.

[0212] The expression vector for producing a polypeptide can also contains an inducible promoter that is recognized by the host bacterial organism and is operably linked to the nucleic acid encoding, for example, a C. vulgaris protein homologue or fragment thereof of interest. Inducible promoters suitable for use with bacterial hosts include the beta-lactamase and lactose promoter systems (Chang et al., Nature 275: 615 (1978); Goeddel et al., Nature 281: 544 (1979); both of which are herein incorporated by reference in their entirety), the arabinose promoter system (Guzman et al., J. Bacteriol. 174: 7716-7728 (1992); herein incorporated by reference in its entirety), alkaline phosphatase, a tryptophan (trp) promoter system (Goeddel, Nucleic Acids Res. 8: 4057 (1980); EP 36,776; both of which are herein incorporated by reference in their entirety) and hybrid promoters such as the tac promoter (deBoer et al., Proc. Natl. Acad. Sci. USA 80: 21-25 (1983); herein incorporated by reference in its entirety). However, other known bacterial inducible promoters are suitable (Siebenlist et al., Cell 20:269 (1980); herein incorporated by reference in its entirety).

[0213] Promoters for use in bacterial systems also generally contain a Shine-Dalgarno (S.D.) sequence operably linked to the DNA encoding the polypeptide of interest. The promoter can be removed from the bacterial source DNA by restriction enzyme digestion and inserted into the vector containing the desired DNA.

[0214] Construction of suitable vectors containing one or more of the above-listed components employs standard ligation techniques. Isolated plasmids or DNA fragments are cleaved, tailored, and re-ligated in the form desired to generate the plasmids required. Examples of available bacterial expression vectors include, but are not limited to, the multifunctional E. coli cloning and expression vectors such as Bluescript Registered™ (Stratagene, La Jolla, Calif.), in which, for example, encoding a C. vulgaris protein homologue or fragment thereof, may be ligated into the vector in frame with sequences for the amino-terminal Met and the subsequent 7 residues of beta-galactosidase so that a hybrid protein is produced; pIN vectors (Van Heeke and Schuster J. Biol. Chem. 264: 5503-5509 (1989). Herein incorporated by reference in its entirety); and the like. pGEX vectors (Promega, Madison Wis.) may also be used to express foreign polypeptides as fusion proteins with glutathione 5-transferase (GST). In general, such fusion proteins are soluble and can easily be purified from lysed cells by adsorption to glutathione-agarose beads followed by elution in the presence of free glutathione. Proteins made in such systems are designed to include heparin, thrombin or factor XA protease cleavage sites so that the cloned polypeptide of interest can be released from the GST moiety at will.

[0215] Suitable host bacteria for a bacterial vector include archaebacteria and eubacteria, especially eubacteria, and most preferably Enterobacteriaceae. Examples of useful bacteria include Escherichia, Enterobacter, Azotobacter, Erwinia Bacillus, Pseudomonas, Klebsiella, Proteus, Salmonella, Serratia, Shigella, Rhizobia, Vitreoscilla, and Paracoccus. Suitable E. coli hosts include E. coli W3110 (American Type Culture Collection (ATCC), Manassas, Va.) 27,325), E. coli 294 (ATCC 31,446), E. coli B, and E. coli X1776 (ATCC 31,537). These examples are illustrative rather than limiting. Mutant cells of any of the above-mentioned bacteria may also be employed. It is, of course, necessary to select the appropriate bacteria taking into consideration replicability of the replicon in the cells of a bacterium. For example, E. coli, Serratia, or Salmonella species can be suitably used as the host when well known plasmids such as pBR322, pBR325, pACYC177, or pKN410 are used to supply the replicon. E. coli strain W3110 is a preferred host or parent host because it is a common host strain for recombinant DNA product fermentations. Preferably, the host cell should secrete minimal amounts of proteolytic enzymes.

[0216] Host cells are transfected and preferably transformed with the above-described vectors and cultured in conventional nutrient media modified as appropriate for inducing promoters, selecting transformants, or amplifying the genes encoding the desired sequences.

[0217] Numerous methods of transfection are known to the ordinarily skilled artisan, for example, calcium phosphate and electroporation. Depending on the host cell used, transformation is done using standard techniques appropriate to such cells. The calcium treatment employing calcium chloride, as described in section 1.82 of Sambrook et al., Molecular Cloning: A Laboratory Manual, New York: Cold Spring Harbor Laboratory Press, (1989), is generally used for bacterial cells that contain substantial cell-wall barriers. Another method for transformation employs polyethylene glycol/DMSO, as described in Chung and Miller (Chung and Miller, Nucleic Acids Res. 16: 3580 (1988); herein incorporated by reference in its entirety). Yet another method is the use of the technique termed electroporation.

[0218] Bacterial cells used to produce the polypeptide of interest for purposes of this invention are cultured in suitable media in which the promoters for the nucleic acid encoding the heterologous polypeptide can be artificially induced as described generally, e.g., in Sambrook et al., Molecular Cloning: A Laboratory Manual, New York: Cold Spring Harbor Laboratory Press, (1989). Examples of suitable media are given in U.S. Pat. Nos. 5,304,472 and 5,342,763; both of which are incorporated by reference in their entirety.

[0219] (j) Computer Media

[0220] The nucleotide sequence provided in SEQ ID NO:1, through SEQ ID NO:3519 or fragment thereof, or complement thereof, or a nucleotide sequence at least 90% identical, preferably 95%, identical even more preferably 99% or 100% identical to the sequence provided in SEQ ID NO:1 through SEQ ID NO:3519 or fragment thereof, or complement thereof, can be “provided” in a variety of mediums to facilitate use. Such a medium can also provide a subset thereof in a form that allows a skilled artisan to examine the sequences.

[0221] In one application of this embodiment, a nucleotide sequence of the present invention can be recorded on computer readable media As used herein, “computer readable media” refers to any medium that can be read and accessed directly by a computer. Such media include, but are not limited to: magnetic storage media, such as floppy discs, hard disc, storage medium, and magnetic tape: optical storage media such as CD-ROM; electrical storage media such as RAM and ROM; and hybrids of these categories such as magnetic/optical storage media A skilled artisan can readily appreciate how any of the presently known computer readable mediums can be used to create a manufacture comprising computer readable medium having recorded thereon a nucleotide sequence of the present invention.

[0222] As used herein, “recorded” refers to a process for storing information on computer readable medium. A skilled artisan can readily adopt any of the presently known methods for recording information on computer readable medium to generate media comprising the nucleotide sequence information of the present invention. A variety of data storage structures are available to a skilled a for creating a computer readable medium having recorded thereon a nucleotide sequence of the present invention. The choice of the data storage structure will generally be based on the means chosen to access the stored information. In addition, a variety of data processor programs and formats can be used to store the nucleotide sequence information of the present invention on computer readable medium. The sequence information can be represented in a word processing text file, formatted in commercially-available software such as WordPerfect and Microsoft Word, or represented in the form of an ASCII file, stored in a database application, such as DB2, Sybase, Oracle, or the like. A skilled artisan can readily adapt any number of data processor structuring formats (e.g. text file or database) in order to obtain computer readable medium having recorded thereon the nucleotide sequence information of the present invention.

[0223] By providing one or more of nucleotide sequences of the present invention, a skilled artisan can routinely access the sequence information for a variety of purposes. Computer software is publicly available which allows a skilled artisan to access sequence information provided in a computer readable medium. The examples which follow demonstrate how software which implements the BLAST (Altschul et al., J. Mol. Biol. 215: 403-410 (1990), herein incorporated by reference in its entirety) and BLAZE (Brutlag, et al, Comp. Chem. 17: 203-207 (1993), herein incorporated by reference in its entirety) search algorithms on a Sybase system can be used to identify open reading frames (ORFs) within the genome that contain homology to ORFs or proteins from other organisms. Such ORFs are protein-encoding fragments within the sequences of the present invention and are useful in producing commercially important proteins such as enzymes used in amino acid biosynthesis, metabolism, transcription, translation, RNA processing, nucleic acid and a protein degradation, protein modification, and DNA replication, restriction, modification, recombination, and repair.

[0224] The present invention further provides systems, particularly computer-based systems, which contain the sequence information described herein. Such systems are designed to identify commercially important fragments of the nucleic acid molecule of the present invention. As used herein, “a computer-based system” refers to the hardware means, software means, and data storage means used to analyze the nucleotide sequence information of the present invention. The minimum hardware means of the computer-based systems of the present invention comprises a central processing unit (CPU), input means, output means, and data storage means. A skilled artisan can readily appreciate that any one of the currently available computer-based system are suitable for use in the present invention.

[0225] As indicated above, the computer-based systems of the present invention comprise a data storage means having stored therein a nucleotide sequence of the present invention and the necessary hardware means and software means for supporting and implementing a search means. As used herein, “data storage means” refers to memory that can store nucleotide sequence information of the present invention, or a memory access means which can access manufactures having recorded thereon the nucleotide sequence information of the present invention. As used herein, “search means” refers to one or more programs which are implemented on the computer-based system to compare a target sequence or target structural motif with the sequence information stored within the data storage means. Search means are used to identify fragments or regions of the sequence of the present invention that match a particular target sequence or target motif. A variety of known algorithms are disclosed publicly and a variety of commercially available software for conducting search means are available can be used in the computer-based systems of the present invention. Examples of such software include, but are not limited to, MacPattern (EMBL), BLASTIN and BLASTIX (NCBIA). One of the available algorithms or implementing software packages for conducting homology searches can be adapted for use in the present computer-based systems.

[0226] The most preferred sequence length of a target sequence is from about 10 to 100 amino acids or from about 30 to 300 nucleotide residues. However, it is well recognized that during searches for commercially important fragments of the nucleic acid molecules of the present invention, such as sequence fragments involved in gene expression and protein processing, may be of shorter length.

[0227] As used herein, “a target structural motif,” or “target motif,” refers to any rationally selected sequence or combination of sequences in which the sequences the sequence(s) are chosen based on a three-dimensional configuration which is formed upon the folding of the target motif. There are a variety of target motifs known in the art. Protein target motifs include, but are not limited to, enzymatic active sites and signal sequences. Nucleic acid target motifs include, but are not limited to, promoter sequences, cis elements, hairpin structures and inducible expression elements (protein binding sequences).

[0228] Thus, the present invention further provides an input means for receiving a target sequence, a data storage means for storing the target sequences of the present invention sequence identified using a search means as described above, and an output means for outputting the identified homologous sequences. A variety of structural formats for the input and output means can be used to input and output information in the computer-based systems of the present invention. A preferred format for an output means ranks fragments of the sequence of the present invention by varying degrees of homology to the target sequence or target motif. Such presentation provides a skilled artisan with a ranking of sequences which contain various amounts of the target sequence or target motif and identifies the degree of homology contained in the identified fragment.

[0229] A variety of comparing means can be used to compare a target sequence or target motif with the data storage means to identify sequence fragments sequence of the present invention. For example, implementing software which implement the BLAST and BLAZE algorithms (Altschul et al., J. Mol. Biol. 215: 40'-410 (1990), herein incorporated by reference in its entirety) can be used to identify open frames within the nucleic acid molecules of the present invention. A skilled artisan can readily recognize that any one of the publicly available homology search programs can be used as the search means for the computer-based systems of the present invention.

### Uses of the Agents of the Present Invention

[0230] Nucleic acid molecules and fragments thereof of the present invention may be employed to obtain other nucleic acid molecules from the same species. Such nucleic acid molecules include the nucleic acid molecules that encode the complete coding sequence of a protein and promoters and flanking sequences of such molecules. In addition, such nucleic acid molecules include nucleic acid molecules that encode for other isozymes or gene family members. Such molecules can be readily obtained by using the above-described nucleic acid molecules or fragments thereof to screen cDNA or genomic libraries obtained from C. vulgaris. Methods for forming such libraries are well known in the art.

[0231] Nucleic acid molecules and fragments thereof of the present invention may also be employed to obtain other nucleic acid molecules such as nucleic acid homologues. Such homologues include the nucleic acid molecules that encode, in whole or in part, protein homologues of other species, plants or other organisms. Such molecules can be readily obtained by using the above-described nucleic acid molecules or fragments thereof to screen cDNA or genomic libraries. Methods for forming such libraries are well known in the art Such homologue molecules may differ in their nucleotide sequences from those found in one or more of SEQ ID NO:1 through SEQ ID NO:3519 or complements thereof because complete complementarity is not needed for stable hybridization. The nucleic acid molecules of the present invention therefore also include molecules that, although capable of specifically hybridizing with the nucleic acid molecules may lack “complete complementarity” In a particular embodiment, methods or 3′ or 5′ RACE may be used to obtain such sequences (Frohman, M. A. et al., Proc. Natl. Acad. Sci. (USA) 85:8998-9002 (1988); Ohara, O. et al, Proc. Natl. Acad. Sci. (U.S.A.) 86:5673-5677 (1989), both of which are herein incorporated by reference in their entirety).

[0232] Any of a variety of methods may be used to obtain one or more of the above-described nucleic acid molecules (Zamechik et al., Proc. Natl. Acad. Sci. (U.S.A.) 83: 4143-4146 (1986); Goodchild et al., Proc. Natl. Acad. Sci. (U.S.A.) 85: 5507-5511 (1988); Wickstrom et al., Proc. Natl. Acad. Sci. (U.S.A.) 85: 1028-1032 (1988); Holt et al., Molec. Cell. Biol. 8: 963-973 (1988); Gerwirtz et al., Science 242: 1303-1306 (1988); Anfossi et al., Proc. Natl. Acad. Sci. (U.S.) 86: 3379-3383 (1989); Becker et al., EMBO J. 8: 3685-3691 (1989); all of which are herein incorporated by reference in their entirety). Automated nucleic acid synthesizers may be employed for this purpose. In lieu of such synthesis, the disclosed nucleic acid molecules may be used to define a pair of primers that can be used with the polymerase chain reaction (Mullis et al., Cold Spring Harbor Symp. Quant. Biol. 51: 263-273 (1986); Erlich et al., European Patent 50,424; European Patent 84,796, European Patent 258,017, European Patent 237,362; Mullis, European Patent 201,184; Mullis et al., U.S. Pat. No. 4,683,202; Erlich, U.S. Pat. No. 4,582,788; and Saiki, R. et al., U.S. Pat. No. 4,683,194, all of which are herein incorporated by reference in their entirety) to amplify and obtain any desired nucleic acid molecule or fragment.

[0233] Promoter sequence(s) and other genetic elements including but not limited to transcriptional regulatory elements associated with one or more of the disclosed nucleic acid sequences can also be obtained using the disclosed nucleic acid sequences provided herein. In one embodiment, such sequences are obtained by incubating EST nucleic acid molecules or preferably fragments thereof with members of genomic libraries and recovering clones that hybridize to the EST nucleic acid molecule or fragment thereof. In a second embodiment, methods of “chromosome walking,” or inverse PCR may be used to obtain such sequences (Frohmnan, et al., Proc. Natl. Acad. Sci. (U.S.A.) 85:8998-9002 (1988); Ohara, et al., Proc. Natl. Acad. Si. (U.S.A.) 86: 5673-5677 (1989); Pang et al., Biotechniques, 22(6); 1046-1048 (1977); Huang et al., Methods Mol. Biol. 69: 89-96 (1977); Hartl et al., Methods Mol. Biol. 58: 293-301 (1996), all of which are herein incorporated by reference in their entirety). In one embodiment, the disclosed ESTs are used to identify cDNAs whose analogous genes contain promoters with desirable expression patterns. Isolation and functional analysis of the 5′ flanking promoter sequences of these genes from genomic libraries, for example, using genomic screening methods and PCR techniques would result in the isolation of useful promoters and transcriptional regulatory elements. These methods are known to those of skill in the art and have been described (See for example Birren et al., Genome Analysis:Analyzing DNA, 1, (1997), Cold Spring Harbor Laboratory Press, Cold Spring Harbor, N.Y., herein incorporated by reference in its entirety). Promoters obtained utilizing the ESTs of the present invention could also be modified to affect their control characteristics. Examples of such modifications would include but are not limited to enhancer sequences as reported by Kay et al., Science 236:1299 (1987), herein incorporated by reference in its entirety.

[0234] In an aspect of the present invention, one or more of the agents of the present invention may be used to detecting the presence, absence or level of a organism, preferably a green alga and more preferably Chlorella, and even more preferably an C. vulgaris in a sample, In another aspect of the present invention, one or more of the nucleic molecules of the present invention are used to determine the level (i.e., the concentration of mRNA in a sample, etc.) or pattern (i.e., the kinetics of expression, rate of decomposition, stability profile, etc.) of the expression encoded in part or whole by one or more of the nucleic acid molecule of the present invention (collectively, the “Expression Response” of a cell or tissue). As used herein, the Expression Response manifested by a cell or tissue is said to be “altered” if it differs from the Expression Response of cells or tissues of organisms not exhibiting the phenotype. To determine whether a Expression Response is altered, the Expression Response manifested by the cell or tissue of the organism exhibiting the phenotype is compared with that of a similar cell or tissue sample of a organism not exhibiting the phenotype. As will be appreciated, it is not necessary to re-determine the Expression Response of the cell or tissue sample of organisms not exhibiting the phenotype each time such a comparison is made; rather, the Expression Response of a particular organism may be compared with previously obtained values of normal organism. As used herein, the phenotype of the organism is any of one or more characteristics of an organism.

[0235] In one sub-aspect, such an analysis is conducted by determining the presence and/or identity of polymorphism(s) by one or more of the nucleic acid molecules of the present invention and more specifically, one or more of the EST nucleic acid molecule or fragment thereof which are associated with phenotype, or a predisposition to phenotype.

[0236] Any of a variety of molecules can be used to identify such polymorphism(s). In one embodiment, one or more of the EST nucleic acid molecules (or a sub-fragment thereof) may be employed as a marker nucleic acid molecule to identify such polymorphism(s). Alternatively, such polymorphisms can be detected through the use of a marker nucleic acid molecule or a marker protein that is genetically linked to (i.e., a polynucleotide that co-segregates with) such polymorphism(s).

[0237] In an alternative embodiment, such polymorphisms can be detected through the use of a marker nucleic acid molecule that is physically linked to such polymorphism(s). For this purpose, marker nucleic acid molecules comprising a nucleotide sequence of a polynucleotide located within 1 mb of the polymorphism(s), and more preferably within 100 kb of the polymorphism(s), and most preferably within 10 kb of the polymorphism(s) can be employed.

[0238] The genomes of animals and plants naturally undergo spontaneous mutation in the course of their continuing evolution (Gusella, Ann. Rev. Biochem. 55:831-854 (1986), herein incorporated by reference in its entirety). A “polymorphism” is a variation or difference in the sequence of the gene or its flanking regions that arises in some of the members of a species. The variant sequence and the “original” sequence co-exist in the species' population. In some instances, such co-existence is in stable or quasi-stable equilibrium.

[0239] A polymorphism is thus said to be “allelic,” in that, due to the existence of the polymorphism, some members of a species may have the original sequence (i.e., the original “allele”) whereas other members may have the variant sequence (i.e., the variant “allele”). In the simplest case, only one variant sequence may exist, and the polymorphism is thus said to be di-allelic. In other cases, the species' population may contain multiple alleles, and the polymorphism is termed tri-allelic, etc. A single gene may have multiple different unrelated polymorphisms. For example, it may have a di-allelic polymorphism at one site, and a multi-allelic polymorphism at another site.

[0240] The variation that defines the polymorphism may range from a single nucleotide variation to the insertion or deletion of extended regions within a gene. In some cases, the DNA sequence variations are in regions of the genome that are characterized by short tandem repeats (STR5) that include tandem di- or tri-nucleotide repeated motifs of nucleotides. Polymorphisms characterized by such tandem repeats are referred to as “variable number tandem repeat” (“VNTR”) polymorphisms. VNTRs have been used in identity analysis (Weber, U.S. Pat. No. 5,075,217; Armour, et al., FEBS Left. 307:113-115 (1992); Jones, et al., Eur. J. Haematol. 39:144-147 (1987); Horn, et al., PCT Application WO91/14003; Jeffreys, European Patent Application 370,719; Jeffreys, U.S. Pat. No. 5,175,082; Jeffreys. et al, Amer. J. Hum. Genet. 39:11-24 (1986); Jeffreys. et al., Nature 316:76-79 (1985); Gray, et al., Proc. R Acad Soc. Lond. 243:241-253 (1991); Moore, et al., Genomics 10:654-660 (1991); Jeffreys, et al., Anim. Genet. 18:1-15 (1987); Hillel, et al., Anim. Genet. 20:145-155 (1989); Hillel, et al., Genet. 124:783-789 (1990), all of which are herein incorporated by reference in their entirety).

[0241] The detection of polymorphic sites in a sample of DNA may be facilitated through the use of nucleic acid amplification methods. Such methods specifically increase the concentration of polynucleotides that span the polymorphic site, or include that site and sequences located either distal or proximal to it Such amplified molecules can be readily detected by gel electrophoresis or other means.

[0242] The most preferred method of achieving such amplification employs the polymerase chain reaction (“PCR”) (Mullis, et al., Cold Spring Harbor Symp. Quant. Biol. 51:263-273 (1986); Erlich, et al., European Patent Appln. 50,424; European Patent Appln. 84,796, European Patent Application 258,017, European Patent Appln. 237,362; Mullis, European Patent Appln. 201,184; Mullis, et al., U.S. Pat. No. 4,683,202; Erlich., U.S. Pat. No. 4,582,788; and Saiki, et al., U.S. Pat. No. 4,683,194, all of which are herein incorporated by reference in their entirety), using primer pairs that are capable of hybridizing to the proximal sequences that define a polymorphism in its double-stranded form.

[0243] In lieu of PCR, alternative methods, such as the “Ligase Chain Reaction” (“LCR”) may be used (Barany, Proc. Natl. Acad. Sci. (U.S.A.) 88:189-193 (1991), herein incorporated by reference in its entirety). LCR uses two pairs of oligonucleotide probes to exponentially amplify a specific target. The sequences of each pair of oligonucleotides is selected to permit the pair to hybridize to abutting sequences of the same strand of the target. Such hybridization forms a substrate for a template-dependent ligase. As with PCR, the resulting products thus serve as a template in subsequent cycles and an exponential amplification of the desired sequence is obtained.

[0244] LCR can be performed with oligonucleotides having the proximal and distal sequences of the same strand of a polymorphic site. In one embodiment, either oligonucleotide will be designed to include the actual polymorphic site of the polymorphism. In such an embodiment, the reaction conditions are selected such that the oligonucleotides can be ligated together only if the target molecule either contains or lacks the specific nucleotide that is complementary to the polymorphic site present on the oligonucleotide. Alternatively, the oligonucleotides may be selected such that they do not include the polymorphic site (see, Segev, PCT Application WO 90/01069, herein incorporated by reference in its entirety).

[0245] The “Oligonucleotide Ligation Assay” (“OLA”) may alternatively be employed (Landegren, et al., Science 241:1077-1080 (1988), herein incorporated by reference in its entirety). The OLA protocol uses two oligonucleotides which are designed to be capable of hybridizing to abutting sequences of a single strand of a target OLA, like LCR, is particularly suited for the detection of point mutations. Unlike LCR, however, OLA results in “linear” rather than exponential amplification of the target sequence.

[0246] Nickerson, et al. have described a nucleic acid detection assay that combines attributes of PCR and OLA (Nickerson, et al., Proc. Natl. Acad Sci (U.S.A.) 87:8923-8927 (1990), herein incorporated by reference in its entirety). In this method, PCR is used to achieve the exponential amplification of target DNA, which is then detected using OLA. In addition to requiring multiple, and separate, processing steps, one problem associated with such combinations is that they inherit all of the problems associated with PCR and OLA.

[0247] Schemes based on ligation of two (or more) oligonucleotides in the presence of nucleic acid having the sequence of the resulting “di-oligonucleotide”, thereby amplifying the di-oligonucleotide, are also known (Wu, et al., Genomics 4:560 (1989), herein incorporated by reference in its entirety), and may be readily adapted to the purposes of the present invention.

[0248] Other known nucleic acid amplification procedures, such as allele-specific oligomers, branched DNA technology, transcription-based amplification systems, or isothermal amplification methods may also be used to amplify and analyze such polymorphisms (Malek, et al., U.S. Pat. No. 5,130,238; Davey, et al., European Patent Application 329,822; Schuster et al., U.S. Pat. No. 5,169,766; Miller, et al, PCT Application WO 89/06700; Kwoh, et al., Proc. Natl. Acad. Sci. (U.S.A.) 86:1173-1177 (1989); Gingeras, et al., PCT Application WO 88/10315; Walker, et al., Proc. Natl. Acad. Sci. (USA) 89:392-396 (1992), all of which are herein incorporated by reference in their entirety).

[0249] The identification of a polymorphism can be determined in a variety of ways. By correlating the presence or absence of it in an plant with the presence or absence of a phenotype, it is possible to predict the phenotype of that plant If a polymorphism creates or destroys a restriction endonuclease cleavage site, or if it results in the loss or insertion of DNA (e.g., a VNTR polymorphism), it will alter the size or profile of the DNA fragments that are generated by digestion with that restriction endonuclease. As such, individuals that possess a variant sequence can be distinguished from those having the original sequence by restriction fragment analysis. Polymorphisms that can be identified in this manner are termed “restriction fragment length polymorphisms” (“RFLPs”). RFLPs have been widely used in human and plant genetic analyses (Glassberg, UK Patent Application 2135774; Skolnick, et al., Cytogen. Cell Genet. 32:58-67 (1982); Botstein, et al., Ann. J. Hum. Genet. 32:314-331 (1980); Fischer, et al. PCT Application WO90/13668; Uhlen, PCT Application WO90/11369, all of which are herein incorporated by reference in their entirety).

[0250] Polymorphisms can also be identified by Single Strand Conformation Polymorphism (SSCP) analysis. The SSCP technique is a method capable of identifying most sequence variations in a single strand of DNA, typically between 150 and 250 nucleotides in length (Elles, Methods in Molecular Medicine: Molecular Diagnosis of Genetic Diseases, Humana Press (1996); Orita et al., Genomics 5: 874-879 (1989), both of which are herein incorporated by reference in their entirety). Under denaturing conditions a single strand of DNA will adopt a conformation that is uniquely dependent on its sequence conformation. This conformation usually will be different, even if only a single base is changed. Most conformations have been reported to alter the physical configuration or size sufficiently to be detectable by electrophoresis. A number of protocols have been described for SSCP including, but not limited to Lee et al., Anal. Biochem. 205: 289-293 (1992); Suzuki et al., Anal. Biochem. 192: 82-84 (1991); Lo et al., Nucleic Acids Research 20: 1005-1009 (1992); Sarkar et al., Genomics 13: 441-443 (1992), all of which are herein incorporated by reference in their entirety). It is understood that one or more of the nucleic acids of the present invention, may be utilized as markers or probes to detect polymorphisms by SSCP analysis.

[0251] Polymorphisms may also be found using a DNA fingerprinting technique called amplified fragment length polymorphism (AFLP), which is based on the selective PCR amplification of restriction fragments from a total digest of genomic DNA to profile that DNA (Vos, et al., Nucleic Acids Res. 23:4407-4414 (1995), herein incorporated by reference in its entirety). This method allows for the specific co-amplification of high numbers of restriction fragments, which can be visualized by PCR without knowledge of the nucleic acid sequence.

[0252] AFLP employs basically three steps. Initially, a sample of genomic DNA is cut with restriction enzymes and oligonucleotide adapters are ligated to the restriction fragments of the DNA. The restriction fragments are then amplified using PCR by using the adapter and restriction sequence as target sites for primer annealing. The selective amplification is achieved by the use of primers that extend into the restriction fragments, amplifying only those fragments in which the primer extensions match the nucleotide flanking the restriction sites. These amplified fragments are then visualized on a denaturing polyacrylamide gel.

[0253] AFLP analysis has been performed on Salix (Beismann, et al, Mol. Ecol. 6:989-993 (1997); Acinetobacter (Janssen, et al., Int. J. Syst. Bacteriol 47:1179-1187 (1997), both of which are herein incorporated by reference in their entirety), Aeromonas popoffi (Guys, et al., Int. J. Syst. Bacteriol. 47:1165-1171 (1997), herein incorporated by reference in its entirety), rice (McCouch, et al., Plant Mol. Biol. 35:89-99 (1997); Nandi, et al., Mol. Gen. Genet. 255:1-8 (1997); Cho, et al., Genome 39:373-378 (1996), all of which are herein incorporated by reference in their entirety), barley (Hordeum vulgare) (Simons, et al., Genomics 44:61-70 (1997); Waugh, et al., Mol. Gen. Genet. 255:311-321 (1997); Qi, et al., Mol. Gen. Genet. 254:330-336 (1997); Becker, et al., Mol. Gen. Genet. 249:65-73 (1995), all of which are herein incorporated by reference in their entirety), potato (Van der Voort, et al., Mol. Gen. Genet. 255:438-447 (1997); Meksem, et al., Mol. Gen. Genet. 249:74-81 (1995), both of which are herein incorporated by reference in their entirety), Phytophthora infestans (Van der Lee, et al., Fungal Genet. Biol. 21:278-291 (1997), herein incorporated by reference in its entirety), Bacillus anthracis (Keim, et al., J. Bacteriol. 179:818-824 (1997), herein incorporated by reference in its entirety), Astragalus cremnophylax (Travis, et al., Mol. Ecol, 5:735-745 (1996), herein incorporated by reference in its entirety), Arabidopsis (Cnops, et al., Mol. Gen. Genet. 253:32-41 (1996), herein incorporated by reference in its entirety), Escherichia coli (Lin, et al., Nucleic Acids Res. 24:3649-3650 (1996), herein incorporated by reference in its entirety), Aeromonas (guys, et al., Int. J. Syst. Bacteriol. 46:572-580 (1996), herein incorporated by reference in its entirety), nematode (Folkertsma, et al., Mol. Plant. Microbe Interact. 9:47-54 (1996), herein incorporated by reference in its entirety), tomato (Thomas, et al., Plant J 8:785-794 (1995), herein incorporated by reference in its entirety), and human (Latorra, et al., PCR Methods Appl. 3:351-358 (1994), herein incorporated by reference in its entirety). AFLP analysis has also been used for fingerprinting mRNA (Money, et al, Nucleic Acids Res. 24:2616-2617 (1996); Bachem, et al, Plant J. 9:745-753 (1996), both of which are herein incorporated by reference in their entirety). It is understood that one or more of the nucleic acid molecules of the present invention, may be utilized as markers or probes to detect polymorphisms by AFLP analysis for fingerprinting mRNA.

[0254] Polymorphisms may also be found using random amplified polymorphic DNA (RAPD) (Williams et al., Nucl. Acids Res. 18: 6531-6535 (1990), herein incorporated by reference in its entirety) and cleaveable amplified polymorphic sequences (CAPS) (Lyamichev et al., Science 260: 778-783 (1993), herein incorporated by reference in its entirety). It is understood that one or more of the nucleic acid molecules of the present invention, may be utilized as markers or probes to detect polymorphisms by RAPD or CAPS analysis.

[0255] Polymorphisms are useful, through linkage analysis, to define the genetic distances or physical distances between polymorphic traits. A physical map or ordered array of genomic DNA fragments in the desired region containing the gene may be used to characterize and isolate genes corresponding to desirable traits. For this purpose, yeast artificial chromosomes (YACs), bacterial artificial chromosomes (BACs), and cosmids are appropriate vectors for cloning large segments of DNA molecules. Although fewer clones are needed to make a contig for a specific genomic region by using YACs (Agyare et al., Genome Res. 7: 1-9 (1997); James et al., Genomics 32: 425-430 (1996), both of which are herein incorporated by reference in their entirety), chimerism in the inserted DNA fragment can arise. Cosmids are convenient for handling smaller-size DNA molecules and may be used for transformation in developing transgenic plants. BACs also carry DNA fragments and are less prone to chimerism.

[0256] Through genetic mapping, a fine scale linkage map can be developed using DNA markers, and, then, a genomic DNA library of large-sized fragments can be screened with molecular markers linked to the desired trait Molecular markers are advantageous for agronomic traits that are otherwise difficult to tag, such as resistance to pathogens, insects and nematodes, tolerance to abiotic stresses, quality parameters and quantitative traits. The essential requirements for marker-assisted selection in a plant breeding program are: (1) the marker(s) should co-segregate or be closely linked with the desired trait; (2) an efficient means of screening large populations for the molecular marker(s) should be available; and (3) the screening technique should have high reproducibility across laboratories, be economical to use and be user-friendly. Molecular marker studies using near-isogenic lines (NILs) (Martin et al., Proc. Natl. Acad. Sci. (U.S.A.). 88: 2336-2340 (1991); Young et al., Genetics 120: 579-585. (1988), both of which are herein incorporated by reference in their entirety), bulked segregant analysis (Michelmore et al., Proc. Natl. Acad. Sci. (U.S.A.) 88: 9828-9832 (1991), herein incorporated by reference in its entirety) or recombinant inbred lines (Mohan et al., Theor. Appl. Genet. 87: 782-788 (1994), herein incorporated by reference in its entirety) have been used to map genes in different plant species (Coe and Neuffer, In: Genetic maps: locus maps of complex genomes, ed. S. J. O'Brien, Cold Spring Harbor Laboratory, Cold Spring Harbor, N.Y., 157-189 (1993), herein incorporated by reference in its entirety). It is understood that one or more of the nucleic acid molecules of the present invention may be used as molecular markers.

[0257] In accordance with this aspect of the present invention, a sample nucleic acid is obtained from cells. Any source of nucleic acid may be used. Preferably, the nucleic acid is genomic DNA. The nucleic acid is subjected to restriction endonuclease digestion. For example, one or more EST nucleic acid molecule or fragment thereof can be used as a probe in accordance with the above-described polymorphic methods. The polymorphism obtained in this approach can then be cloned to identify the mutation at the coding region which alters the protein's structure or regulatory region of the gene which affects its expression level.

[0258] In one aspect of the present invention, an evaluation can be conducted to determine whether a particular mRNA molecule is present. One or more of the nucleic acid molecules of the present invention, preferably one or more of the EST nucleic acid molecules of the present invention are utilized to detect the presence or quantity of the mRNA species. Such molecules are then incubated with cell or tissue extracts of a plant under conditions sufficient to permit nucleic acid hybridization. The detection of double-stranded probe-mRNA hybrid molecules is indicative of the presence of the mRNA; the amount of such hybrid formed is proportional to the amount of mRNA. Thus, such probes may be used to ascertain the level and extent of the mRNA production in a plant's cells or tissues. Such nucleic acid hybridization may be conducted under quantitative conditions (thereby providing a numerical value of the amount of the mRNA present). Alternatively, the assay may be conducted as a qualitative assay that indicates either that the mRNA is present, or that its level exceeds a user set, predefined value.

[0259] A principle of in situ hybridization is that a labeled, single-stranded nucleic acid probe will hybridize to a complementary strand of cellular DNA or RNA and, under the appropriate conditions, these molecules will form a stable hybrid. When nucleic acid hybridization is combined with histological techniques, specific DNA or RNA sequences can be identified within a single cell. An advantage of in situ hybridization over more conventional techniques for the detection of nucleic acids is that it allows an investigator to determine the precise spatial population (Angerer et al., Dev. Biol. 101: 477-484 (1984); Angerer et al., Dev. Biol. 112: 157-166 (1985); Dixon et al., EMBO J. 10: 1317-1324 (1991), all of which are herein incorporated by reference in their entirety). In situ hybridization may be used to measure the steady-state level of RNA accumulation. It is a sensitive technique and RNA sequences present in as few as 5-10 copies per cell can be detected (Hardin et al., J. Mol. Biol. 202: 417-431. (1989), herein incorporated by reference in its entirety). A number of protocols have been devised for in situ hybridization, each with tissue preparation, hybridization, and washing conditions (Meyerowitz, Plant Mol. Biol. Rep. 5: 242-250 (1987); Cox and Goldberg, In: Plant Molecular Biology: A Practical Approach (ed. C. H. Shaw), pp. 1-35. IRL Press, Oxford (1988); Raikhel et al., In situ RNA hybridization in plant tissues. In Plant Molecular Biology Manual, vol. B9: 1-32. Kluwer Academic Publisher, Dordrecht, Belgium (1989), all of which are herein incorporated by reference in their entirety).

[0260] In situ hybridization also allows for the localization of proteins within a tissue or cell (Wilkinson, In Situ Hybridization, Oxford University Press, Oxford (1992); Langdale, In Situ Hybridization 165-179 In: The Maize Handbook, eds. Freeling and Walbot, Springer-Verlag, New York (1994), both of which are herein incorporated by reference in their entirety). It is understood that one or more of the molecules of the present invention, preferably one or more of the EST nucleic acid molecules of the present invention or one or more of the antibodies of the present invention may be utilized to detect the expression level or pattern of a protein or mRNA thereof by in situ hybridization.

[0261] Fluorescent in situ hybridization also enables the localization of a particular DNA sequence along a chromosome which is useful, among other uses, for gene mapping, following chromosomes in hybrid lines or detecting chromosomes with translocations, transversions or deletions. In situ hybridization has been used to identify chromosomes in several plant species (Griffor et al., Plant Mol. Biol. 17: 101-109 (1991); Gustafson et al., Proc. Nat'l. Acad. Sci. (U.S.A.). 87:1899-1902 (1990); Mukai and Gill, Genome 34: 448-452. (1991); Schwarzacher and Heslop-Harnison, Genome 34: 317-323 (1991); Wang et al., Jpn. J. Genet. 66: 313-316 (1991); Parra and Windle, Nature Genetics, 5: 17-21 (1993), all of which are herein incorporated by reference in their entirety). It is understood that the nucleic acid molecules of the present invention may be used as probes or markers to localize sequences along a chromosome.

[0262] It is also understood that one or more of the molecules of the present invention, preferably one or more of the EST nucleic acid molecules of the present invention or one or more of the antibodies of the present invention may be utilized to detect the expression level or pattern of a protein or mRNA thereof by in situ hybridization.

[0263] Further, it is also understood that any of the nucleic acid molecules of the present invention may be used as marker nucleic acids and or probes in connection with methods that require probes or marker nucleic acids. As used herein, a probe is an agent that is utilized to determine an attribute or feature (e.g. presence or absence, location, correlation, identity, etc.) or a molecule, cell, tissue or plant. As used herein, a marker nucleic acid is a nucleic acid molecule that is utilized to determine an attribute or feature (e.g., presence or absence, location, correlation, etc.) or a molecule, cell, tissue or plant.

[0264] Nucleic acid molecules of the present invention can be used to monitor expression. A microarray-based method for high-throughput monitoring of gene expression may be utilized to measure gene-specific hybridization targets. This ‘chip’-based approach involves using microarrays of nucleic acid molecules as gene-specific hybridization targets to quantitatively measure expression of the corresponding genes (Schena et al., Science 270: 467-470 (1995); Shalon, Ph.D. Thesis, Stanford University (1996), both of which are herein incorporated by reference in their entirety). Every nucleotide in a large sequence can be queried at the same time. Hybridization can be used to efficiently analyze nucleotide sequences.

[0265] Several microarray methods have been described. One method compares the sequences to be analyzed by hybridization to a set of oligonucleotides or cDNA molecules representing all possible subsequences (Bains and Smith, J. Theor. Biol. 135: 303 (1989), herein incorporated by reference in its entirety). A second method hybridizes the sample to an array of oligonucleotide or cDNA probes. An array consisting of oligonucleotides or cDNA molecules complementary to subsequences of a target sequence can be used to determine the identity of a target sequence, measure its amount, and detect differences between the target and a reference sequence. Nucleic acid molecules microarrays may also be screened with protein molecules or fragments thereof to determine nucleic acid molecules that specifically bind protein molecules or fragments thereof.

[0266] The microarray approach may also be used with polypeptide targets (U.S. Pat. No. 5,445,934; U.S. Pat. No. 5,143,854; U.S. Pat. No. 5,079,600; U.S. Pat. No. 4,923,901, all of which are herein incorporated by reference in their entirety). Essentially, polypeptides are synthesized on a substrate (microarray) and these polypeptides can be screened with either protein molecules or fragments thereof or nucleic acid molecules in order to screen for either protein molecules or fragments thereof or nucleic acid molecules that specifically bind the target polypeptides (Fodor et al., Science 251: 767-773 (1991), herein incorporated by reference in its entirety).

[0267] It is understood that one or more of the molecules of the present invention, preferably one or more of the nucleic acid molecules or protein molecules or fragments thereof of the present invention may be utilized in a microarray based method. In a preferred embodiment of the present invention, one or more of the C. vulgaris nucleic acid molecules or protein molecules or fragments thereof of the present invention may be utilized in a microarray based method. A particular preferred microarray embodiment of the present invention is a microarray comprising nucleic acid molecules encoding genes or fragments thereof that are homologues of known genes or nucleic acid molecules that comprise genes or fragment thereof that elicit only limited or no matches to known genes. A further preferred microarray embodiment of the present invention is a microarray comprising nucleic acid molecules having genes or fragments thereof that are homologues of known genes and nucleic acid molecules that comprise genes or fragment thereof that elicit only limited or no matches to known genes.

[0268] Nucleic acid molecules of the present invention may be used in site directed mutagenesis. Site directed mutagenesis may be utilized to modify nucleic acid sequences, particularly as it is a technique that allows one or more of the amino acids encoded by a nucleic acid molecule to be altered (e.g. a threonine to be replaced by a methionine). Three basic methods for site-directed mutagenesis are often employed. These are cassette mutagenesis (Wells et al., Gene 34: 315-23 (1985), herein incorporated by reference in its entirety), primer extension (Gilliam et al., Gene 12:129-137 (1980); Zoller and Smith, Methods Enzymol. 100: 468-500 (1983); Dalbadie-McFarland et al., Proc. Natl. Acad. Sci. (U.S.A.). 79: 6409-6413 (1982), all of which are herein incorporated by reference in their entirety) and methods based upon PCR (Scharf et al., Science 233: 1076-1078 (1986); Higuchi et al., Nucleic Acids Res. 16: 7351-7367 (1988), both of which are herein incorporated by reference in their entirety). Site-directed mutagenesis approaches are also described in EP 0 385 962, EP 0 359 472, and PCT Patent Application WO 93/07278, all of which are herein incorporated by reference by reference in their entirety.

[0269] Site-directed mutagenesis strategies have been applied to plants for both in vitro as well as in vivo site-directed mutagenesis (Lanz et al., J. Biol. Chem. 266: 9971-9976 (1991); Kovgan and Zhdanov, Biotekhnologjya 5: 148-154, No. 207160n, Chemical Abstracts 110: 225 (1989); Ge et al., Proc. Natl. Acad. Sci. (USA) 86: 4037-4041 (1989); Zhu et al., J. Biol. Chen 271: 18494-18498 (1996); Chu et al., Biochemistry 33: 6150-6157 (1994), Small et al., EMBO J. 11: 1291-1296 (1992); Cho et al., Mol. Biotechnol. 8: 13-16 (1997); Kita et al., J. Biol. Chem. 271: 26529-26535 (1996); Jin et al., Mol. Microbiol. 7: 555-562 (1993); Hatfield and Viersta, J. Biol. Chem. 267:14799-14803 (1992); Zhao et al., Biochemistry 31: 5093-5099 (1992), all of which are herein incorporated by reference in their entirety).

[0270] Any of the nucleic acid molecules of the present invention may either be modified by site-directed mutagenesis or used as, for example, nucleic acid molecules that are used to target other nucleic acid molecules for modification. It is understood that mutants with more than one altered nucleotide can be constructed using techniques that practitioners skilled in the art are familiar with such as isolating restriction fragments and ligating such fragments into an expression vector (see, for example, Sambrook et al., Molecular Cloning. A Laboratory Manual, Cold Spring Harbor Press (1989)). In a preferred embodiment of the present invention, one or more of the nucleic acid molecules or fragments thereof of the present invention may be modified by site-directed mutagenesis.

[0271] In addition to the above discussed procedures, practitioners are familiar with the standard resource materials which describe specific conditions and procedures for the construction, manipulation and isolation of macromolecules (e.g., DNA molecules, plasmids, etc.), generation of recombinant organisms and the screening and isolating of clones, (see for example, Sambrook et al., Molecular Cloning. A Laboratory Manual, Cold Spring Harbor Press (1989); Mailga et al., Methods in Plant Molecular Biology, Cold Spring Harbor Press (1995); Birren et al., Genome Analysis Analyzing DNA, 1, Cold Spring Harbor, N.Y., all of which are herein incorporated by reference in their entirety).

[0272] Having now generally described the invention, the same will be more readily understood through reference to the following examples which are provided by way of illustration, and are not intended to be limiting of the present invention, unless specified.

### EXAMPLE 1

[0273] The cDNA library LIB191 is prepared from the cultures of the eukaryotic green microalgae Chlorella vulgaris C-265. Chlorella cultures were grown in SUN basal salts media supplemented with 15 mM ammonia chloride and 10 mM glucose. The culture is grown with shaking in the presence of light to a high turbidity. Supplemental glucose is added to the media to a concentration of 50 mM and the culture is induced by the additional glucose for 24 hours and harvested. The glucose induction of the cells is confirmed by assaying for the enzyme Sucrose Phosphate Synthase known to be glucose induced. Total RNA is isolated using standard methods and precipitated with LiCl. Poly A+mRNA is purified by oligodT chromatography for use in library construction in pSPORT plasmid.

[0274] For the construction of the cDNA library of the present invention, the Superscript™ Plasmid System for cDNA synthesis and Plasmid Cloning (Gibco BRL, Life Technologies, Gaithersburg, Md.) or similar system, following the conditions suggested by the manufacturer, is used. cDNA size fractionation columns from Gibco BRL (Gibco BRL, Life Technologies, Gaithersburg, Md.) are used for size selection of cDNA inserts. Clones are selected and the plasmid DNA is isolated using a commercially available kit.

[0275] The quality of the cDNA libraries is determined by examining the cDNA insert size, and also by sequence analysis of a random selection an appropriate number of clones from the library.

### EXAMPLE 2

[0276] The cDNA library of the present invention, LIB 191, is plated on LB agar containing the appropriate antibiotics for selection and incubated at 37° C. for a sufficient time to allow the growth of individual colonies. Single colonies are individually placed in each well of 96-well microtiter plates containing LB liquid including the selective antibiotics. The plates are incubated overnight at approximately 37° C. with gentle shaking to promote growth of the cultures. The plasmid DNA is isolated from each clone using a commercially available kit such as Qiaprep plasmid isolation kits, using the conditions recommended by the manufacturer (Qiagen Inc., Santa Clarita, Calif.). A variety of plasmid isolation kits are commercially available.

[0277] The template plasmid DNA clones are used for subsequent sequencing. For sequencing the cDNA library LIB191, a commercially available sequencing kit, such as the ABI PRISM dRhodamine Terminator Cycle Sequencing Ready Reaction Kit with AmpliTaq® DNA Polymerase, FS, is used under the conditions recommended by the manufacturer (PE Applied Biosystems, Foster City, Calif.). The ESTs of the present invention are generated by sequencing initiated from the 5′ end of each cDNA clone.

[0278] Two basic methods can be used for DNA sequencing, the chain termination method of Sanger et al., Proc. Natl. Acad. Sci. (U.S.A.) 74: 5463-5467 (1977), herein incorporated by reference in its entirety and the chemical degradation method of Maxam and Gilbert, Proc. Natl. Acad. Sci. (U.S.A.) 74: 560-564 (1977), herein incorporated by reference in its entirety. Automation and advances in technology such as the replacement of radioisotopes with fluorescence-based sequencing have reduced the effort required to sequence DNA (Craxton, Method 2: 20-26 (1991); Ju et al., Proc. Natl. Acad. Sci. (U.S.A.) 92: 4347-4351 (1995); Tabor and Richardson, Proc. Natl. Acad. Sci. (U.S.A.) 92: 6339-6343 (1995), all of which are herein incorporated by reference in their entirety). Automated sequencers are available from, for example, Pharmacia Biotech, Inc., Piscataway, N.J. (Pharmacia ALF), LI-COR, Inc., Lincoln, Nebr. (LI-COR 4,000) and Millipore, Bedford, Mass. (Millipore BaseStation).

[0279] In addition, advances in capillary gel electrophoresis have also reduced the effort required to sequence DNA and such advances provide a rapid high resolution approach for sequencing DNA samples (Swerdlow and Gesteland, Nucleic Acids Res. 18: 1415-1419 (1990); Smith, Nature 349: 812-813 (1991); Luckey et al., Methods Enzymol. 218: 154-172 (1993); Lu et al., J. Chromatog. A. 680: 497-501 (1994); Carson et al., Anal. Chem. 65: 3219-3226 (1993); Huang et al., Anal. Chem. 64: 2149-2154 (1992); Kheterpal et al., Electrophoresis 17: 1852-1859 (1996); Quesada and Zhang, Electrophoresis 17:1841-1851 (1996); Baba, Yakugaku Zasshi 117: 265-281 (1997), all of which are herein incorporated by reference in their entirety).

[0280] A number of sequencing techniques are known in the art, including fluorescence-based sequencing methodologies. These methods have the detection, automation and instrumentation capability necessary for the analysis of large volumes of sequence data Currently, the 377 DNA Sequencer (Perkin-Elmer Corp., Applied Biosystems Div., Foster City, Calif.) allows the most rapid electrophoresis and data collection. With these types of automated systems, fluorescent dye-labeled sequence reaction products are detected and data entered directly into the computer, producing a chromatogram that is subsequently viewed, stored, and analyzed using the corresponding software programs. These methods are known to those of skill in the art and have been described and reviewed (Birren et al, Genome Analysis: Analyzing DNA, 1, Cold Spring Harbor, N.Y., herein incorporated by reference in its entirety).

The application's sequence listing, which the Patent Office published only in electronic form, follows.

SEQUENCE LISTING (3519 sequences)

SEQ ID NO: 1 - DNA, 322 bp, Chlorella vulgaris
acattgacaagctctcctaccccagctttgtgaagaaactgatgaagctgccgggctaacaaccgcttaacggccaacctggtgcacctgttcctccaggccaatcaaaaagtgcggctccttggacaatgagcccgagctagagaagtcttacatctactgagcgcctgggcctggccttgtggcaatgactactcagccgctcgctgagtaatccactgcatggctagtgggtgtttggcttgtggcataccactgtttggccaggctgtgctgaagcctggggccttggggttccctgctgcgcagccctgcctgcctg

SEQ ID NO: 2 - DNA, 384 bp, Chlorella vulgaris
gggtcgagccatgcaccaagccttcggccaatcgttcgggtccggccggtaagggcaatggcaaaaagcaaccttcggccgggcaaaccaggccaccatgaggaacaaccctggcaaaattgtggttcggtacatccaacgcaattgctcgtggacaaacaagctcatcaacggcaaggaccacgccagcgtgcaggtcaatattgggcacctggatgagaatggcgtgtacactggcagcttcagcacctttgccctgtgcggccaggtccgctccaagggtgaggctgatgccgctatggacctgctctggcagaagaagaaggctgagattggccagcagtgattggagcttgagcgcgggcagcacgctgctgtgcacgc

SEQ ID NO: 3 - DNA, 356 bp, Chlorella vulgaris
cggccaagccttcgggggggcaagcctgatgccggtgacttcatctcgccctcgctgctgctgctggggcctcccggtgtgggcaagaccacgcttctcagagatgtggccaacatcctggcggacaccttcaggaagcgggtggtggtaattgacaccagcaacgagatagccggtgacgcatccacaccccatgcctgcatcggccgggcacggcgcatgatggtccctgaccgtggttcccagcatgcagtcatgattgaggcagtgcagaaccacacgccgcaggccatcatcatcgacgagattgggtccagcaaggatgctgcagctgccaagagcatcggacagcgggg

SEQ ID NO: 4 - DNA, 397 bp, Chlorella vulgaris
  unsure (1)..(397): unsure at all n locations
ggccgacccacgcatccggattagcaaagatggcgaccgcaatgctgaacgccaaggccaccagctttgctgcggctaagaccgcccctaggtcccgtgcggcccgcctggtggtccgtgctgccgctgtccccgccgaggtcccggacatgaacaagcgtgtcctgatgaactggctgctggcgggcgccatcggtgctcccactgtcggccttgccgtgccttatgccctcttctttgtgccccccaagagtggcngcngtggctctggttaggtcgccaaggatgctctgggcaacgatgtcaaggccaccacctggcttgccacccaccagcccggtgacaggtccctttcacagggccttaagggcgatgccacctacctcatcgtgaatga

SEQ ID NO: 5 - DNA, 256 bp, Chlorella vulgaris
aagcaagcggagcgggacagcagtacggaccagcagtatgcgccagccgcaccggccatatcagcgaagagaagtaccagaacctgcagcttgcagttgccggcggcctgaatggggcccagccggggagcactggcggcgggcaggcacatgaattgcacaaagcgctggcgggcggcagctgccgccgacctctcctcgtgcttgctgtgcgcttgaatgctatgggcatggcgctgtaagacttgactagctt

SEQ ID NO: 6 - DNA, 369 bp, Chlorella vulgaris
  unsure (1)..(369): unsure at all n locations
agcagctgctcagcgggcagaatgttgtctgcgtgcgctgcgaggagatcaacatctctggcggcatggtcaggcagaaaatgaagtatgagcgcttcctgaacaagcgcatggttaccaaccccaggagggctgcctacaagttcagggcacccgcccgcatcctgtggaggactgtccgcggcatgatccctcacaagaccccccgcggcgcagcagccctggaccgcctcaaggcctttgagggtgtgccccacccctacgacaaggtgaagcgtctggtgatccccgatgcgctgcgcgtgctccgcctgcagcacggccacaagtactgcaagctgggagacctgtccgcngcngttggctggc

SEQ ID NO: 7 - DNA, 263 bp, Chlorella vulgaris
ggtcgacagacgcgatccgagcagctgtccagaaacgagagctcgagcgtgggctttgagcagcatggtgaaccagtgcgacattcggtgactgtccagtgactgcgatgtgctagttcgagctgccgcaaacagccgtcatagcaagcagagcttaaaagggatgcatacttgctaagggaatgtcttctacaacctgtaaaagattgacagtggaatagtacatcagcgagctatacatccgctttgaatcctgaggagac

SEQ ID NO: 8 - DNA, 398 bp, Chlorella vulgaris
cacgcgtccagttcactgtgtacttgcagaggtgtagtgaggctagctacccaaggtccacctgtcattggcaactgttgtggggttggacaaggttaccttcacttgactacaatgtcagtactagcgccggcactgacccaggttgggctgcaggtgctgctgcagccctatggggggtttatcagccaaactagctgcacgcttgcgggcgtcatctaccccgcctatgcctccttcaaggctgtgcaagtgttgacccggcggaggacgacggaggaggcagagaagtggcttacatactgggcagtctatgcctccttcagcgtggtggagcgactgctggacaaggcgctgccctggctgccatggtacaacacgctgaagtttgccttcat

SEQ ID NO: 9 - DNA, 407 bp, Chlorella vulgaris
cccccagctacctgaagggcgagttcgccggcgactacggctgggacactgctggtctgtctgccgatccccaaaccttcgctgcctaccgcgaggttgaggtcatccatgcccgctgggccatgcttggcgccctgggctgcctgacccccgagctgctgcagaacgccggcgtggccagcttcggcgacgctgctgtgtggttcaaggctggtgcctccatcttcggcgatgatggcctgaactacctgggcaacccctccctggtccatgcccagtccatcgtggccaccctggccgtgcaggtcatcctcatggctcaggctgaggctttccgtgtgagcggcactgccccctggagcggcgaggagctcgacaccctggtacccggtgatgcctttgacccc

SEQ ID NO: 10 - DNA, 388 bp, Chlorella vulgaris
  unsure (1)..(388): unsure at all n locations
agatatgcgtgtgttggccgatgtccgggggttccccctcacgggtttggcaattaacaacaactcgggcctaggcctcttgcttgctgcatgttcgtagttttcccttaaagtcaccgagcttgttgtgccatttganaagaccatgtactaagggctcaactgcgggcaccacagcagataatgtaactgtgcagtgtatcctctttgtgttggctgtggacatgggcatttgttgcaacattgttcagttttgttcatgatcgccacgagacttggaagccctgtgcttgtttgtaggtgcacatggtattcatgtgctgcgaaaattgctagtggttcacgacggtgctgtgccatagctccaggtcatttgttgatatatata

SEQ ID NO: 11 - DNA, 275 bp, Chlorella vulgaris
aaggaattcaaaaacggccgcctggccatggggtcaatgcttggctttggcttgcagggcctgctcaccggcaagggccccctggagaacctggctgaccacctggctgaccccaccgtgaacaacggctttgccgtggccaccaagttcacccccggcaactgagctggttgtcttgacggacgtttggctgtgctgcttgacaggctggaggtcagcattactatgctggccttgtcttgagaagaaaatccttgtgtaactagctaaccatc

SEQ ID NO: 12 - DNA, 309 bp, Chlorella vulgaris
aaacctccaaaaacccaactaaccgcttcaaccgtcacaaaaccaaccgtaaaatccccgtcaaggaaacctggaggcgccccaagggtattgactcccgggtgcgcaggaatttcaagggatgcggcgtgaatatgcctaacatcggctatggcaccaacaagaagaccaggcacctcctgcccaacggcttctacaagtttgttgtgagcaacgtgaaggacctggagctgctgatgatgcacaaccgcaagtactgcgccgagatcgcgcacaacgtgtccaccctcaagcgcaaggcgattgtgg

SEQ ID NO: 13 - DNA, 365 bp, Chlorella vulgaris
agcccacgcgtccgcttacaggtagtgagagtgccaccaaagccgccagaatgcagaccaccttcgtgggcaccacccaggcgctgcgcgccaaggtctccacccaggccactcgtggctccaaggtagcaacctccatgcgccgcaccgtcaagtccaagaacgtgaagaccaccgacaccagccagtggtacggtcccgaccgccccaagttcctgggccccttctccgagggtgctgtgccttcctacctgaacggcgagttcgctggtgactacggctgggacaccgccggcctgtccgccgaccccgagaccttcaagcgctaccgccagattgaggtcatccatgcccgctgggccatg

SEQ ID NO: 14 - DNA, 354 bp, Chlorella vulgaris
acggacgcgtggggtaggttccagctgcccgaacagctggccgccacgttcctggtgacagagggaccgtcatgcagattttcgtcaagaccctcacgggcaagactatcacccttgaggtggagtcttcggacactattgagaatgtgaaggctaagattcaggacaaggagggcatcccccctgaccagcagcgtctgatcttcgccggcaagcagctggaggacgggcgtaccctggccgactacaacatccagaaggagtccactctgcacctggtgctgcgcctgcgcggcggcatcatcgagccctccctgcagatcctggcccgcaagtacaaccaggacaagatga

SEQ ID NO: 15 - DNA, 407 bp, Chlorella vulgaris
  unsure (1)..(407): unsure at all n locations
cccacgcgtccgccgaaagagtcaaaggcagacacaccatgcaggtgcaagccctcttcaagaagcttggcggcggtgcccccgctaaggcagccaagaacgccgccggtgcatccaagaaagccgttggcaacgccaagaaggtcgcctctggcagcaccaagggtggctggctgggcactgacagcaagaacatccacctggacaggtggtaaggccctgaccgcgccctgtacctgcccggtggcctgctggaacgcgctgacgtgcccagctacctgaaccgcagcctgcccggcgactatggctacgacccccttggtctgggcaaggatggcagcctggataagtancgcgccaacgagctgctgcacgcatgctgggacatacctgccgctgctggcgcc

SEQ ID NO: 16 - DNA, 264 bp, Chlorella vulgaris
ctccgtggagtggtacggccctgacagggccaagttcctgggccccttctctgagggctccacccccagctacctgaagggcgagttcgccggcgactacggctgggacactgctggtctgtctgccgatccccaaaccttcgctgcctatcgcgaggttgaggtcatccatgcccgctgggccatgcttggcgccctgggctgcctgacccccgagctgctgcagaacgccggcgtaggcagcttcggcgacgctgcctgtgt

SEQ ID NO: 17 - DNA, 384 bp, Chlorella vulgaris
  unsure (1)..(384): unsure at all n locations
gcgattcgaactaacgcctatccgaggcttcctcgaagacagaagacatcaacatgtctgacggaggggacagcccgaaggccgccgaggcccccgccgccgccgcggctcccgcccccggcgagcccatggacatcaacaccgccatccagctggtgctcaagaaggcgctggctcacgacggcctcgcacgcggcctgcacgaggcctgcagggccattgagcgcggccaggcgcagctgtgcatcctcgccgacgactgcaaccagcccgactacaagaagctgattgaggccctgtgcgccgagcagagcgtcaacctcattgccgtgcccgaccccaagaccctgngccagtgggcaagcctgtgcaagattgacagcg

SEQ ID NO: 18 - DNA, 375 bp, Chlorella vulgaris
acccacgcgtccgcccacgcgtccgcccacgcgtccgcaccatcccacggtgcttgggatagctgcaggggtgtcaagcaggcatccgcaccatgcctttcaagaggtacgtggagattggccgtgtggccatgattaactacggccctgagtacggcaagctggtggtcatctcagacgtggtcgaccagaacagggccctgattgaccggcccgacgagacccgccgtgtggagaacttcaagcgccttgcaatcactgacttcaaggtggagattccccgcctggccaagaagtccgtgctgaagaaggccctggaggaggctgatgtgttcaacaagtttgctgctagcgcctggggccagaagctggcca

SEQ ID NO: 19 - DNA, 414 bp, Chlorella vulgaris
cccacgcgtccgggttgcggcccctcctgccgcggtcaggaaggccgctcagccggccaagcccgtgaaccccctgtatgagaagaggccgaagaccttcggtatcggtggtgccctgccacccaagaccgaccttcaccgctttgtgaagtggcccaagtatgtgcgcatccagaggcagaagcgtgtgctcaaccagcgtctcaaggtgccccccgcactgaaccgcttcacccgcacgctggacaagaacatggccgagagcctgttcaagctgctgctcaagtaccgccccgaggacaaggcagccaagaagcagcggctgctggctgaggccgaggcccgtaccgccggcaaggaggtggagaagaagaagccgtggtgggcaaatttgggctgagacacatcaccacg

SEQ ID NO: 20 - DNA, 369 bp, Chlorella vulgaris
acggacgcgtgggatcttgttcaacctgcttgggctttggcttgggggcgctgctctttggcaaccctggcaagcaccctgcaaggaccggcaccgaggaggccctgctggcagcagacgtggagaggcaatacgtggagaatggcggctgctgcgggggcaagcacgtgtaggagtactacctagtgggctggtagtggacgtggttggggggggggggcagttgcgttacagccccatttctttagtcatgtggcagcctgtcatggcaacacctagtagaattatgcctgctgttgggggagtatttcttggcttataggctggaattgccagctcggcttggcaaggcctgagcgacaggggcat

SEQ ID NO: 21 - DNA, 359 bp, Chlorella vulgaris
agcccagtcgctggtgcgcggcgagcgtgtgacgctgtccaaggtggacgcctttgctgacggcgtggccatcaagctgccgggggccgagtccttcaggctgtgcacggagctgctggatggcatggtgctggtggacaactcggccgtcagcaccgccatcaaggatgtgttcaatgaagttaggtccatcttggagccagcgggggctgtggctctggcgggagccaaggcgtacctgcaccggtaccaagtcaagggcatgaatgtggtcctggtcactaatggcgcccatatcaactttgaccgtctgcacctagtcccagattcggctgatgtgggcatcgcggaaagcatgc

SEQ ID NO: 22 - DNA, 375 bp, Chlorella vulgaris
  unsure (1)..(375): unsure at all n locations
aagaaactacatccccggctggaaaactccggaacaaccaaaacccccaatccatttaaaaccttggcggacatcaaccgggttaaaattaaccgcaccattgcggcccaacggaaccggaaatcccggcgaatggaagaaatgcggcggctacggatccagcagcgtcttaagcagggtgagctggatggcaaggangagctggaggaggagcagtacccctcctctatccccttcttcccccccgtcaacgagaagaccctccaatcgtacatccagctatacgcggtcaccgtgtcggccatcatcttgtttgggggcctgctggcgccctccctggaggtccacatggggctgggaaggcactcctactac

SEQ ID NO: 23 - DNA, 406 bp, Chlorella vulgaris
  unsure (1)..(406): unsure at all n locations
agttcacctagtgatagcattctttctgctttatagtctttaccttttgtacgtattggacactcccccttgcttcctttctttgccaagtccttcaaaccgggcctctgccatcgtgttctgtggtcctcttgagagctgtttctcttactaagcttgcaatctctagtacaagtcccggcttccatctcaaatgtggaaggtgaacatgatataaatattgtttgtgcttgcccgcctgagtgcctgtgcagcagggcaagtgcgcaagcccccctcggtgtagttacttggcagaagacttgcttattgatttggctgcggttttgtgtgcttcattgtgtangagaagaataggctgagcatgccattggcgtgttgtgctgatttcctgggactggtcttt

SEQ ID NO: 24 - DNA, 379 bp, Chlorella vulgaris
acccacgcgtccgtgcttttcttggaggtgtgacacttgtgactggcctctgggttggctcaacggtcgtctccttgtattacaacaaccggcagcttcaagagcagcagaggatagcggaagccacacggacagatgacaaggagtgagagttcctgggctggcagagggtttgttccatggccttgttagcttcgtcctgtaccttgcaggggtcggtggcttgtgtacttgttaggtgtgccactgccattccatggcagaccttccctcgttgttgggcaaggcgaggccatcagcacttgatgtagttgtaatgtaggccggtgcattgggctgaatgcacgggttgtacgggtatccattctgttttcatgtg

SEQ ID NO: 25 - DNA, 395 bp, Chlorella vulgaris
accaagattttgatgggcaagaacacgctgctgcgccgctgcatccgcctatactgcgagcgcaccggcaacgaccactggctgggcctgctggactacctggtccgcaatgtcgggctggtcttcacccagggcgacctcaatgaggtgcgcacgcaaatcggtgagttcaaggtgggcgcccccgcccgcgtgggcctggtggcccccaacgacgtgaccatccccgccggcaacaccggcatggacccctcgcagacctccttcttccaggccctcaacatccccaccaagatcaacaagggtactgtggagattgtgtctgacgtggtggtgtgccgccagcgcgagaaggtgggcgggtctgaggccacctgctgtctaagctgggcatc

SEQ ID NO: 26 - DNA, 400 bp, Chlorella vulgaris
  unsure (1)..(400): unsure at all n locations
cggacgcgtgggcttaggcgttcttggcaccatggctgagaagtcatgcacgatcaggacacgaaagttcatgaccaaccgcctgctgcagcggaggcagtttatccttgatgtgctgcaccctggccgtgccaatgtctccaagactgagctgcgcgagaagctgtccaagatgtacgacgtcaaggactccaactgcgtgtttgtctttggcctgaagacccagtttggtggcggcaagtccacaaggtttggcctcatctacgacaacgtccagngggccaagcagttcgagcccaagtacaggctcatcaggaacggtctggcgcagccggtgcagaagtcgcgcaagcagcagaaggagcgcaagaaccgcaccaagaccatccggcgtgtcaag

SEQ ID NO: 27 - DNA, 207 bp, Chlorella vulgaris
gtctacacattcgaccctaacatgtcccggtcttccgagacctccttctccgggcctgccgtaatgcgtcaatcctctcgccccaactctcgtctccctcctctcgcacatcgctcttcctcgccgctatcatgccacatggtccttctatcccgcgacaaacttcagcgggaaacctccgcccgcagccccgatcttcgacgctgc

SEQ ID NO: 28 - DNA, 377 bp, Chlorella vulgaris
  unsure (1)..(377): unsure at all n locations
acncacgcgtccggccaactacggcaactgcaatatggggagcgccatgaagggtgactttgttgagtgcccaggcacggagctctactgagcgacctgtcatgcccagcttgctcagcagtggcttactaccgagagttgccttcacccgcaacagttctgtggtttcacaatggcttcaggaggtggctgcggcatcggtgtgagcagagtgatgggtagctgttgcgctgtttaggtgtgccgcctggtgctatagctttcatggtatacgagtatgcagggtaggccaaagaaactgcagtactttctttgcccctgacatcaatggcgctctgatgtcttctgggcttgaaactgttgatatggaggtgatt

SEQ ID NO: 29 - DNA, 329 bp, Chlorella vulgaris
  unsure (1)..(329): unsure at all n locations
acggacccttgggcggacccttgggccctaaggagggggaatggaaaaggctgcaaccaggcttggctttccttcgctgaccgacaattcattgacgtcacctaatgctgcttcaatggtgctgcaaacatacagtgctgcctgnacatgttgctcgtttgcgtgatgctaatttgttcgggagtaggtggctccccaagagaatcaattgtgtgctcagtactcgggtgtatggtgcgtctcaactttcttacccctggacagatatgcttgggctatgtatactctgtacaaggcacantattccagcgtgcaacataagatcactg

SEQ ID NO: 30 - DNA, 109 bp, Chlorella vulgaris
acccacgcatccacccacgcgttctgctaacgcgtgggaggacgcgtggagtggaatcgctcgtccagatcatgtctatcgttcacagggtgcagattctctctgctca

SEQ ID NO: 31 - DNA, 378 bp, Chlorella vulgaris
aagcgattcgaactaacgcctatccgaggcttcctcgaagacagaagacatcaacatgtctgacggaggggacagcccgaaggccgccgaggcccccgccgccgccgcggctcccgcccccggcgagcccatggacatcaacaccgccatccagctggtgctcaagaaggcgctggctcacgacggcctcgcacgcggcctgcacgaggcctgcagggccattgagcgcggccaggcgcagctgtgcatcctcgccgacgactgcaaccagcccgactacaagaagctgattgaggccctgtgcgccgagcagagcgtcaacctcattgccgtgcccgaccccaagaccctggggccagtgggcaggcctgtgcaaga

SEQ ID NO: 32 - DNA, 295 bp, Chlorella vulgaris
tgagtcgtattactcctatccgaggcttcctcgattacatcatacatcaccatgtctgatggaggggacagcccttaaagcctccgatgcctccgcctccgccacgggtcccgcccccttatatacctttaaaattaacatctctatctaactgatgctcaggctcgtcctactgaagacactttcttcagcgccttacaagtggtttgtacctaccttgcattcagttaatcgtacctatgcatcctcaccaatcactgctaactccttatctacgtggtccagtttcaggctc

SEQ ID NO: 33 - DNA, 162 bp, Chlorella vulgaris
cagtcttctgttgaactagcagtgggaaatggcaggcctacttggagtgtgccaaagccctaggggaggagctagtgaaaccgcagataagcctggtatatgggggtggcaattgtggcttgattggccctgtggcatagacggtggcagctgggctggggg

SEQ ID NO: 34 - DNA, 89 bp, Chlorella vulgaris
tttatcatctttttttttttttctctgaatcttcctggctactagctccttaccccctaccttgcccaccttttcttcatgcccatcat

SEQ ID NO: 35 - DNA, 185 bp, Chlorella vulgaris
tgagtcgtattagatattccattcttccatatcatattactatgtctctcattttatctccctttttctttaatgatatctttactctctgtcctctcttcggtgggggcaacctcatcttctccttttcaaatatctgctcatctttcatccatacattctctaacgttctttatctttctcct

SEQ ID NO: 36 - DNA, 170 bp, Chlorella vulgaris
cgtccgaacacacgtccgcccacgcgtccgcccacgcgtcggcagacctgctgttccgggatgtgaccctgcggagcttctggattgccacttggatgcacagcatgagcactgacgacatgggcatggttgttgccgacatcatacagctgctggagataaaggtcatc

SEQ ID NO: 37 - DNA, 415 bp, Chlorella vulgaris
tccagggtctacgcacacgcctgaacccacacgtccggtgcggtctgtaaggcgcattgccagaagccagcgtccgccgggcaaaacaagccaccatgaggaacgacgctggcgagattgtggatctgtacatcccacgcaagtgctcgtggaccaacaagctcatcacggccaaggaccacgccagcgtgcaggtcaatattggccacctggatgagaatggcgtgtacactggcagcttcagcacctttgccctgtgcggccaggtccgctccaagggtgaggctgatgccgctatggacctgctctggcagaagaagaaggctgaaattggccagcattgattggagcttgaccgcgggcagcacgctgctgtgcacgcggtgatgccctcggagcaaaccgggcattgcac

SEQ ID NO: 38 - DNA, 425 bp, Chlorella vulgaris
ccacgcctccgcacacgcgtcagcccacgcgtccggcgggcaagcctgatgccggtgacttcatctcgccctcgctgctgctgctggggcctcccggtgtgggcaagaccacgcttctcagagatgtggccaacatcctggcggacaccttcaggaagcgggtggtggtaattgacaccagcaacgagatagccggtgacgcatccacaccccatgcctgcatcggccgggcacggcgcatgatggtccctgaccgtggttcccagcatgcagtcatgattgaggcagtgcagaaccacacgccgcaggccatcatcatcgacgagattgggtccagcaaggaggctgcagctgccaagagcatcggacagcggggtgtggtcatggtcggcaacgcgcacggcgtgtccctggagagcctgctg

SEQ ID NO: 39 - DNA, 445 bp, Chlorella vulgaris
cgcacgcgtccgaattagcacagatggcgaccgcaatgctgaacgccaaggccaccagctttgctgcggctaagaccgcccctaggtcccgtgcggcccgcctggtggtccgtgctgccgctgtccccgccgaggtcccggacatgaacaagcgtgtcctgatgaactggctgctggcgggcgccatcggtgctcccactgtcggccttgccgtgccttatgccctcttctttgtgccccccaagagtggcggcggtggctctggtgaggtcgccaaggatgctctgggcaacgatgtcaaggccaccacctggcttgccacccaccagcccggtgacaggtccctttcacagggccttaagggcgatgccacctacctcatcgtgaatgacgatggcgtgatcgagagctacggcctgaacgctgtctgcacccaccttggctg

SEQ ID NO: 40 - DNA, 416 bp, Chlorella vulgaris
  unsure (1)..(416): unsure at all n locations
cggatcctgtgtacttgcagaggtgtagtgaggctagctacccaaggtcccacctgtcattggcaactgttgtggggttggacaaggttaccttcacttgactacaatgtcagtactagcgccggcactgacccaggttgggctgcangtgctgctgcagccctatggggggtttatcagccaaactagctgcacgcttgcgggcgtcatctaccccgcctatgcctccttcaaggctgtgcaagtgttgacccggcggaggacgacggaggaggcagagaagtggcttacatactgggcagtctatgcctccttcagcgtggtggagcgactgctggacaaggcgctgccctggctgccatggtacaacacgctgaagtttgccttcatcctttggctgcagctgccccgctacc

SEQ ID NO: 41 - DNA, 439 bp, Chlorella vulgaris
gggtccacgcacgcgtccgcagcaaggcaatatgcgtctgccatgcggctggcaggcaggggttgagtgtgcagcccctgagacgtcagttgggctgagtctcatgtattggcaaggttgaagcttttggcggacttttgctcctgcctgcccattaaattagtcttttgtagcgagagttgctatgttagtcttccagctggtgctggcattgacatgacagttatctgacatattaatacatgtactgtatcaagcttgtgtcgccatcgggcattcatcccacgatatgctgtcctaaactcacagctattgatcttcgtgacgcgagcacctcttgattgctttgtccttgctttgtagcctttggggcatatttattgcccactgcgctgagcttagagtccagcttccgctagtttgcataaacgaagatggt

SEQ ID NO: 42 - DNA, 434 bp, Chlorella vulgaris
cacccacgcctccggatttgcgtgagttggccgatgtcgggggtttcccctcaccggttttgtcatttactaccactcgggcctaggcctcttgcttgctgcatgttcgtagttttccctggaagtccaccgagcttgttgtgccatttgaaaagaccatgtactaagggctcaactgcgggcaccacagcagataatgtaactgtgcagtgtatcctctttgtgttggctgtggacatgggcatttgttgcaacattgttcagttttgttcatgatcgccacgagacttggaagccctgtgcttgtttgtaggtgcacatggtattcatgtgctgcgaaaattgctagtggttcacgacggtgctgtgccatagctccaggtcatttgttgatatatataccgtgctggcctgcggaccttggaagccgcatg

SEQ ID NO: 43 - DNA, 313 bp, Chlorella vulgaris
cagacgcgtgagcgacagcttcgctgagctcaaggtcaaggagatcaagaacggccgcctggccatggtgtccatgcttggctttggcgtgcagggcctgctcaccggcaagggccccctggagaacctggctgaccacctggctgaccccaccgtgaacaacggctttgccgtggccaccaagttcacccccggcaactgagctggttgtcttgacggacgtttggctgtgctgcttgacaggctggaggtcagcattactatgctggccttgtcttgagaagaaaatccttgtgtaactagctaaccatca

SEQ ID NO: 44 - DNA, 421 bp, Chlorella vulgaris
ccgggtcccacaacgcgtccgaccacgcgtccgcttacaggtagtgagagtgccaccaaagccgccagaatgcagaccaccttcgtgggcaccacccaggcgctgcgcgccaaggtctccacccaggccactcgtggctccaaggtagcaacctccatgcgccgcaccgtcaagtccaagaacgtgaagaccaccgacaccagccagtggtacggtcccgaccgccccaagttcctgggccccttctccgagggtgctgtgccttcctacctgaacggcgagttcgctggtgactacggctgggacaccgccggcctgtccgccgaccccgagaccttcaagcgctaccgccagattgaggtcatccatgcccgctgggccatgcttggcgccctgggctgcatcttgcccgaggtcctgc

SEQ ID NO: 45 - DNA, 436 bp, Chlorella vulgaris
cgggtccacgcacgcgtccgaacacacgtccgccgaaagagtcaaaggcagacacaccatgcaggtgcaagccctcttcaagaagcttggcggcggtgcccccgctaaggcagccaagaaggccgccggtgcagccaagaaggccgttggcaacgccaagaaggtcgcctctggcaccaccaagggtggctggctgggcactgacagcaacaacatcgacctggacaggtggtacggccctgaccgcgccctgtacctgcccggtggcctgctggaccgctctgaggtgcccagctacctgaacggcagcctgcccggcgactatggctacgacccccttggtctgggcaaggatggcggcctggagaagtaccgcgccaacgagctgctgcacgcccgctgggccatgcttgccgctgctggcgccatcatccct

SEQ ID NO: 46 - DNA, 426 bp, Chlorella vulgaris
cacgcgtccggaccaaccaaacagaggctggcctggctgccaagcactttatggacaatggtgacttggtgcccgacgagctggtcgtgggcatggtgaagcagcggctggcccagcccgacaccctggagaagggttggctgctggacggctacccccgcagcgccgtgcaggcagaggcgctggagacgcaaggcatctacccagatgttttcctcctggtccaggtgcctgacgaggtgcttgtggaccgggtctctggtcgccgccttgacccagagactggagagatatatcacttggctttcaaaccgccgccggagggcatcctgggccggctggtccagcggagtgatgacacagaggacaaggtgcggacccgcctggtggcctaccaccagcacgttgcagcggtcgtcgaccgct

SEQ ID NO: 47 - DNA, 416 bp, Chlorella vulgaris
cggtccgacctaccggggtcagccacgcgtccgaggacgcgtgggcggacgcgtgggtgcgggcacttggactgcaaccatgccgaagcagattgaggagatcaaggagtttctcctcaccgccaggcgcaaggatgcccggtctgtgaagatcaagaagaccggcgatgtgaccaagttcaaggtccgctgctcacggtacctgtacaccctctgcgtgaccgactccgacaaggcagacaagctcaagcagtcgctgccgcccggcctgcatgtgcaggagatctgagaagtggagtcgttgtagcagtgatgagtagcgcatgcagcagacggccggaggttgcagcgcgcccagctgtcgccacctgtgtgtaacagcctgctgggccgggtgtgcagcaaggccaccgggt

SEQ ID NO: 48 - DNA, 139 bp, Chlorella vulgaris
  unsure (1)..(139): unsure at all n locations
gtgagtcgaattatcgtgggtttgcancggtggtagtggcatctagggtgcttgtggggccagtccggtgcgcactgttgttgtttggccatgaaagcctatcccaacatgagcctgtggatagtgggtccgacgggca

SEQ ID NO: 49 - DNA, 426 bp, Chlorella vulgaris
gggtccagcacgcgtccgcacacgcgtccgggttgcggcccctcctgccgcggtcaggaaggccgctcagccggccaagcccgtgaaccccctgtatgagaagaggccgaagaccttcggtatcggtggtgccctgccacccaagaccgaccttcaccgctttgtgaagtggcccaagtatgtgcgcatccagaggcagaagcgtgtgctcaaccagcgtctcaaggtgccccccgcactgaaccgcttcacccgcacgctggacaagaacatggccgagagcctgttcaagctgctgctcaagtaccgccccgaggacaaggcagccaagaagcagcggctgctggctgaggccgaggcccgtaccgccggcaaggaggtggagaagaagaagccgtggtggtcaagtttgggctgaaccacatc

SEQ ID NO: 50 - DNA, 435 bp, Chlorella vulgaris
  unsure (1)..(435): unsure at all n locations
ccacccacgcgctccggaccaaggttcacaagatgcagaccctctctgcccgtttcggcgtccgcgcccctgtctcccggggcacccgccaggtgacccgcgcctccgtggagtggtacggccccgaccgcgccaagttcctgggccccttcaccaaccccccttcctacctgaagggtgagttcgctggcgactacggctgggacacctctggcctgtccgccgatcccgagaccttctcccgctacagggaggttgaggtgatccatgcccggtgggccatgcttggcgcccttggctgcgtcgtgcccgagctgctggaccgcaacggcaccgtcaactttggcgagaacgccgtgtggttcaaggccggtgccgccatcttcggcgatgacgggctgaactacctggggcaaccctcnctcatccacgcac

SEQ ID NO: 51 - DNA, 420 bp, Chlorella vulgaris
  unsure (1)..(420): unsure at all n locations
cccacgcgctccgcaggacgcgtgaggatcgatgttcacctgtcgtcgggcttgtggcgtgggtggcgctgctcctttggccaacgctgagcgaagcagcctgaccaggagcgggcatcgagganggccctgctggcagcgagacgtggatgatgcaatacgtgggagaatggcggctgctgcgggggcaagcacgtgtaggagtactacctagtgggctggtagtggacgtggttggggggggggggagttgccttaaagccccatttctttagtcatgtggcagcctgtcatggcaacacctactataattatgcctgctgttgggggagtatttcttggcttataggctggaattgccagctcggcttggcatggcctgagcgacaggggcattcggcagtgcgcagccatgcccct

SEQ ID NO: 52 - DNA, 400 bp, Chlorella vulgaris
cccacgcctccggacccgcctgaacagccagacacgatgacaaagaagaggaggaactcgggtcgcaacaagcacggccgtggccatgtgacccgcgtgcgctgcgaatcctctggcgtgctggtccctaaggacaaggccatcaagcgcttcattgtcaggaacatcgtggatgcctccgccatccgtgatatccaggacgcttgtgctattgatgggtatgcgctgcccaagctgtaccgcaaggtgtattactgcatcagcgcggctatccactccaagattgtgcgcgtgcgcagccgcaagaacaggcgcaacagggagccgcctgcacgccctggtttcgggccccgccgtgagggccagcaaggcgggcagcagggccagcaagggggggggc

SEQ ID NO: 53 - DNA, 172 bp, Chlorella vulgaris
  unsure (1)..(172): unsure at all n locations
actccctcaggtgagtcgtattaatttcctngngtggcgacgggtgggcgcccgctgctgcccatcctccttgctccgctcagtctgagaattctggtgcagttgctccgctcattggggtggcatctgcgatacttccagtgctcactggggtactgcacaccagatttca

SEQ ID NO: 54 - DNA, 211 bp, Chlorella vulgaris
cccacgcgtccgaaggcggtcaccccagagcctggggcagtggcggtgggatccgggcagtgatgttagtgatgggtggcaggtagatcgacgaggagataggggggagtaaccgaactggcagggctggatgcaagtgatgtgcctggctgaggccctgctacaacatgtgagctgacccttccataccagcatgcaaaccgttggaacc

SEQ ID NO: 55 - DNA, 423 bp, Chlorella vulgaris
  unsure (1)..(423): unsure at all n locations
cacccacgcgcccggctcggagagatagtgacaaccatccccaccattggcttcaatgtggagacagtggagtacaagaatattagcttcaccgtgtgggacgttggtgggcaggacaagattcggccgctatggcgccactacttccaaaacacccagggcctcatctttgtggtggacagcaatgaccgtgaccgtattggggaagcgcgggatgagctgcatcgcatgctaaacgaggacgagctccgcgacgcggtgctgctggtgtttgccaacaagcaagatctgcccaacgccatgaacgcagccgagatcaccgacaagcttggcctgcactccctgcgccagcgccactggtacatccagtcctgctgcgccacctctggcgagggtctctacganggcctggactggctctcc

SEQ ID NO: 56 - DNA, 64 bp, Chlorella vulgaris
ccacgcctccgaacacgcgtcagcccacgcgtccgggcaaaaaatagcttcaatgtcgagacag

SEQ ID NO: 57 - DNA, 408 bp, Chlorella vulgaris
  unsure (1)..(408): unsure at all n locations
aggacgcgtgggcttaggcgttcttggcaccatggctgagaagtcatgcacgatcaggacacgaaagttcatgaccaaccgcctgctgcagcggaggcagtttatccttgatgtgctgcaccctggccgtgccaatgtctccaagactgagctgcgcgagaagctgtccaagatgtacgacgtcaaggactccaactgcgtgtttgtctttggcctgaagacccagtttggtggcggcaagtccacagggtttggcctcatctacgacaacgtccagggggccaagcagttcgagcccaagtacaggctcatcangaacggtctggcgcagccggtgcagaagtcgcgcaagcagcagaaggagcgcaagaaccgcaccaagaccatccgcggtgtcaagaagaacgc

SEQ ID NO: 58 - DNA, 412 bp, Chlorella vulgaris
  unsure (1)..(412): unsure at all n locations
cccacgcgctcggatgttatcacgcctggtgtgtcctcagtgacaaaacaanacgttggtgctgactccggggaacttcaagaatgcaagccgcaatcaagccggccaaaaaccccggcgtggaagaggccgaggccgccccaatcaaccgcatcggcatcaccctcacctcccgcaacgtgaagaacctggagaaggtgtgtgccgacctgatccgcggcgccaaggacaagcagctcaaggtgaagggcccggtgcgcatgcccaccaaggtgctgcaaatcaccacccgcaagtcgccctgcggtgaaggtaccaagacctgggaccgcttcaagatgaggatccacaagcgcctcatcgacctgcactcccctgctgagggtgtcaagcagatcacctctatctccat

SEQ ID NO: 59 - DNA, 449 bp, Chlorella vulgaris
cccacgcgtccgaacacgcgtccgcggacgcgtgggcggacgcgtgggcgctgctggccatcgagttcctggtgctgggctttttggagcttaagcgctaccagggcttcaaggagaccggctcgagcggtctgatcaactctttcccctttgaccccgctggcttgaactcccctgacatggccgtccgcgagatcaagaacggccgcctcgccatggttgccttcattggcttctgcgtccaggccctggtgacgcgcaccggccctctggagaacctcgcagcacacctgtctagccccttcgagaacaacttcatcaccaacatcgccaacctgccccagaccctgtcccagtgagctggccgacagtgtgtcacctggcagcatgctatagctagctaaaggtagtctttgaggagggagcctagcaaagcttgtgttggaagg

SEQ ID NO: 60 - DNA, 392 bp, Chlorella vulgaris
  unsure (1)..(392): unsure at all n locations
ccggatccacccacgcctccggagccatcaacaccgacgcggatgcacccatttaccaggtggcggattacggccttgttggggatttgttcaagatcgtgccggagctggaagaggcatcagcaaggcanaacagtgactaagcactttgactcgcgctgtgggtacagacatttgcattatacagcgatgagatcctgtaatgcttattgtgtggcgcgtgctggaaggcctttctactgcggaaaggtttctataagaacgagactgtagttgcttctgttgccaactagaattgcgacgctcacatttgcgatatcttgtgctccaagcatgaaagggcatgcagcagtggagcaaataggggcaattacttaaatacctcttttgtg

SEQ ID NO: 61 - DNA, 426 bp, Chlorella vulgaris
cacacgcgtccgcggacgcgtgggcggacgcgtggggtggaatcccccgtcgacaacaggtccaaggttcacaagatgcagaccctctctgcccgtttcggcgtccgcgcccctgtctcccggggcacccgccaggtgacccgcgcctccgtggagtggtacggccccgaccgcgccaagttcctgggccccttcaccaaccccccttcctacctgaagggtgagttcgctggcgactacggctgggacacctctggcctgtccgccgatcccgagaccttctcccgctacagggaggttgaggtgatccatgcccggtgggccatgcttggcgcccttggctgcgtcgtgcccgagctgctggaccgcaacgggaccgtcaactttggcgagaacgccgtgtggttcaagggcggtgccgccatc

SEQ ID NO: 62 - DNA, 398 bp, Chlorella vulgaris
agcgattcgaactaacgcctatccgaggcttcctcgaagacagaagacatcaacatgtctgacggaggggacagcccgaaggccgccgaggcccccgccgccgccgcggctcccgcccccggcgagcccatggacatcaacaccgccatccagctggtgctcaagaaggcgctggctcacgacggcctcgcacgcggcctgcacgaggcctgcagggccattgagcgcggccaggcgcagctgtgcatcctcgccgacgactgcaaccagcccgactacaagaagctgattgaggccctgtgcgccgagcagagcgtcaacctcattgccgtgcccgaccccaagaccctgggccagtgggcaggcctgtgcaagattgacagcgagggcgaggcgcg

SEQ ID NO: 63 - DNA, 348 bp, Chlorella vulgaris
  unsure (1)..(348): unsure at all n locations
acgcctccgaacgcggcaaaacctcagcacgccgctgctggtgcactggctgcacacgctgctgaccccgaaaggcaaccccaatgaacccgaccacttccttaaagagcaccaggccgagctggaggggctggccacccgcatgactaagacagccggtggctcagtagccgtcttcgctcggtgggaccaggctttgcaagccgtgctgcaatacaacaagggccaggccgtgcagcagcagcccccaggtgctcggctccctggcgcgtcgccggccgcgctggacngcgacgcgggcagcccaccgctggacctgattgctgacacgcccggcagcgcgcccgc

SEQ ID NO: 64 - DNA, 283 bp, Chlorella vulgaris
cacgcgtccgaagacacgtccgcggacgcgtgggcggacgcgtgggaatgttgtggttggctttggcaagaagaggggccgcaactcccagtaaagcctgagcctgggtcaacagaggccgccttgccagagagatgtaaaaggagttccgctgggggcgtggcacgagacttatgcagcctggcagtcacagcggggcagtcatagccaggcaggaccagcggaggaccactgcagtgacatatcttggctgtcagcttcccccgatgtaagagcttcagcg

SEQ ID NO: 65 - DNA, 171 bp, Chlorella vulgaris
acgcgtccgcccacgcgtccgcccacgcgtccgcccacgcgtccgatgccaagtcagacacctacctggaggaggtctcctcctgcaacatcttctgcgtcaagggcaagactattaagactccgccgctgcaaggcactattctgcctggcgtcacacggcgctccatca

SEQ ID NO: 66 - DNA, 392 bp, Chlorella vulgaris
  unsure (1)..(392): unsure at all n locations
acccacgcctccgcagacgcgtgagtgccctcggaaaacacagccagtagtgacagcactgcaattgcacaggcgacggacaaccatcactgcctgtgctagaagccatcagcccactgttaagcgctcctcaacaaaagacaacatgacaaggaattttaagaaagtggcagtcctctgttgagctagcagtgggaaaggcgaagcctacttggagtgtgccanagccctaagggaggagctagtgaaacggaggataagcctggtatatgggggtggcaatgtgggcttgatgggcgctgtggcagagacggtggcagctgggctgggggaaggcgctgtgattggcgtcatccccagcgcgcttgcaccacgcgagatttctgggcaaa

SEQ ID NO: 67 - DNA, 388 bp, Chlorella vulgaris
atcaggttcctgtgttgctttgtagcactcgtacttgtgagccttctcaaaatggcttgcgatgccgcacgcacttcctggccgctgctgcttgcggcgatgttgctgggcattcagggcgctatgagtcacacctatggccaggcattcttgactggagctaggacgaacgccggcgcaagcgcactctatgaaggcctagaacatgacaacgtcgtgtactatgtgctgaacgtgaccggcgtcagggccctctcaggggccagcctagtctttggcaacgcttcactccattcagaagttgttgtcccactgatgtctctggactccccagtcgacggggacttctactttgagggcagcttccatgctggcaacttcacagagc

SEQ ID NO: 68 - DNA, 329 bp, Chlorella vulgaris
aatacgtctcggaggcggcggtggcgggcgagagccaggcagccatcgtcgtctccatgtgcatcgctgcgatcgacatcgtcctgctggcgctgcggtggctctggtacgagcagtacatcacgtacggcggggcggttctgcaagtctttcagatgtaccgcctggtggtgctgccggttgccaacacttggatgtcctggtcgctgcttaacaagctgggcatcacgcccggggcggcggtggtggccgcgataagggcgctggtggtggtgttcctggtgctgggggtgcagatgcggtttttcttgcacgcaacgctgcaactg

SEQ ID NO: 69 - DNA, 245 bp, Chlorella vulgaris
  unsure (1)..(245): unsure at all n locations
ggggccaaagctggacaagcgcatgaaggggcgaactatgccatccancgccctggggaagtacttgctcccggcacggagcatcagcccggtgacagccacangtgtgctgctggtgtcagacttggatgacacgatgatcggggacgacgaggccacggcagcattcaccagctggtggcagtcggccatggtgcccgcgggggggcgcctggtgtacaacacccggcggggctctggacctc

SEQ ID NO: 70 - DNA, 177 bp, Chlorella vulgaris
acgcgtccggaaagatgaaggttagcctcgtagtttgcctgctcctggccagcgcccttgcagtcacggccatcccatctcccaagtccttctgcggagtcagtggtacaacgctgggcggctggaccgtggtggaaggtgtcaactccaccgacgttgtgtctgggagctacacct

SEQ ID NO: 71 - DNA, 419 bp, Chlorella vulgaris
acgcgtccgcacacgcgtccgcccacgcgtccgggagcagcctagtacgtggcagaggcgtctcggtgcgtggcggttctgagccgctaccgtccttctctacatgcagcgttgcgcaaggtacagtagtttggtgcaggtgcagtgagctagagtaagatttctgtacgctgtaggcaatttgttaatagaagctgtgcccgtgattgatgactaatgcgcatcctccctcagagcctcttcctttttctgcctccactccaaacgtaatgtatgttgccgtggcagcgccttaaggctacctgctggagaatgtacccatcgttttcccttttgcatctgaacacggagatgtagtgtattgatgtagtagatatccccttagcatagccagatgcaagcgggcagctgacgtttgg

SEQ ID NO: 72 - DNA, 382 bp, Chlorella vulgaris
cgcgtccgcacacacgtccgggcgtcggctctcaaggcgtggggcggcaagaacgacaactggaatgcgtgccaggaggccttcatggtccgtgccaaggccaacggtgacgccaccctgggcaagggcgacctgtacgccaagggagagtccctgtatgtggagaactacgcctactgagctggcacagcaggcagagcatgccctggctgcccacccaagcccagcccagcacagcgtgcgctgtgcgtgccgaggcatcgccctcttggaccgctgcgccagcacacacattcaggcttccagggtgcagccagccaccaggggcgacctatctcggccgtgggcacgagactgtgcagtgggcagttacgcgtgtggg

SEQ ID NO: 73 - DNA, 386 bp, Chlorella vulgaris
  unsure (1)..(386): unsure at all n locations
acgtgaagacaccgacaccagccagtggtacggtcccgaccgccccaagttcctgggccccttctccganggtgctgtgccttcctaactgaacggcgagttcgctggtgactacggctgggacaccgccggcctgtccgccgaacccgagaccttcaagcgctaccgccagattgaggtcatccatgcccgctgggccatgcttggcgccctgggctgcatcttgcccgaggtcctgcagaggtacagcggcatcgagttcggcgaggctgtgtggttcaaggctggcgctcagatcttctctgacgacggcctgaactacctgggcaaccctgccctcatccacgcccagtccatcattgccaccctcatcacccaggtggtgc

SEQ ID NO: 74 - DNA, 387 bp, Chlorella vulgaris
  unsure (1)..(387): unsure at all n locations
cgtatccaatgtgtgacgtacatttcccagatgtaacggttgaagtgtgtgttgttgcaataccttattaactcatgtattatcgtcccactgcctttcagtttccaagtctgtcntgggcctaaaaccgaacaggcaaccatttttgcttaaattggcaaacagtggggcttgtaagatgattttgcctggtcaaacagggcggngtttggttacgtggattttgactgcttcttaagctgcaccggagcatttatttaaggtggcagataatgcgatcagataggaggaacgggtatactgggctgacagaggtctatggagttatgcgttgtgtcttgcctgaactttgtttggagtgagttgccgccatgtcactgtgcatac

SEQ ID NO: 75 - DNA, 394 bp, Chlorella vulgaris
aggacgcgtgggcgtagatttcggtggcaagctctctagccgtgcgatgttcttgctcaggtgttagcttagccttgtgatcggacagtgggggcgttgaggcagccatgggcaacctgcccaccaaggcggaggagggccttagcaagaccgagctggaacgcatggaaaggaggattaagcgcctgggccggggcgagaaggagctggcacagtctgatttgcagatgattccagagctggcagggaaccctttcatgccagcgctcttcaagatgtatgatcaagacggtgatggctacatagatgcctcagatatgcgcgccctccttgaaagcctgatcaagctgtcagatgaagaggagcgctacagattcgctttccgcatctttga

SEQ ID NO: 76 - DNA, 380 bp, Chlorella vulgaris
cgcgtccgaaacgatccatgaatggtgcttcggttgccggataagttattactgcggagtgtgcgacgttgccctgttcttacctgtatgccttgagtgcctgatcaatcatggcgctgtcagccagcagaaaccttcaagtaccctcccgttttggctgcagttggaagccacgccagtatactacgaggcacagtacgcaggatcagcactacctccgactgcaaggccaagcagctcagcaccagctctcgcttgaccctgaagacgaccaggagctgctgcaccagctgaggcctcacctgcaggctgcatgcactgctcttgacggccacatgggcagctgcaagctaggcacagacagcaaggaggctgcattg

SEQ ID NO: 77 - DNA, 273 bp, Chlorella vulgaris
  unsure (1)..(273): unsure at all n locations
cgtcctaacgcacccacctgcgcctggtgcgtgaggttgaggtgatcggcggcaacgtgctggcctcggcctcgcgcgagcagatggcgtacaacatcgacacctccaaggtcaccgtgcccgaggccctggaggtgcntggcggatccgtgctcaaccccaagttccagagctgggaagtggcggagcagattaagaagatggagggtgacatcaagaacctgaaggacaacccccagaccacgctgctggagggcatgcacagcgtggcat

SEQ ID NO: 78 - DNA, 404 bp, Chlorella vulgaris
  unsure (1)..(404): unsure at all n locations
aatttttcttctgcctactaaccactctaacctgtatgggcactaccgcttctaaggagactccgggccctgtgggcaacggactcaatgtagtggtagccgtggacgaaagccacgtctcactggacacactgcgctgggcggctaaccaggtcctatctccccaagacacgcttcacttggtcaccgtcctagacactgcccactccaatcaagtcaacattgcggaggcagcgccaattgcagacaactccgtaaagcagtgtgtagcggagccaggagccctggaatatactacccgcttcctggagaagctgaagagcgatgtgctcagccatgagaaggccancgttggcagcgtgaggctgacgcccatcgtctcctgtgccaactcctccacggac

SEQ ID NO: 79 - DNA, 391 bp, Chlorella vulgaris
ggcttgtcttccgcaagccaaaatgccgtccataggcttttaccgcaactatggcaagaccttcaagaagccccggcgccccttcgagaaggagcggctggatgccgagctgaagaccgtgggcgagtacggcctgcgcaacaagcgcgagctctggcgtgtgcagatggtgctgtccaagctgcgctccagggcccggtccctgctgaccctggacgagaaggaccccaagcgcctttttgagggtgaggccctcatgcgccgcatgtaccgctacggcttcctggacgagacccagaacaagctcgattacgtgctggcgctcaaccctaccgacgtgctggagcgccgcctgcagaccctggtgttcaagctgggccttgccaagagc

SEQ ID NO: 80 - DNA, 375 bp, Chlorella vulgaris
ccaacgcgtccgcggaccgtgggattccactgggtatttaagggaattctccggagcaacttaccaggccatctggacccttaaccctaaaaattgcccccttcggaatccaaggtccaacggaagggccccattttcagttccctccaaaaatccccttgggtattaggccaaaacataatttgtccatgggacgaccttcttgggatgggtcaacatgggcaccacacttggaaccatttctacaggcatcgctggctttgctgctgaggacgacccaaccaagaagcacaagggcgcgatcacccatagcactgtagagctcataaccacgattctgctgcctatctccatagcgattattggctatgcact

SEQ ID NO: 81 - DNA, 422 bp, Chlorella vulgaris
accacgcgtccggtgtgatatgccgtataacctggcgcattattcgtggtagcacgatcgcttgagctcagagcaacccgcgcggctagctagcaacatgaccgtgacgccagtgccacaatctggcaacccctcaatatccaaacccgcacgcccggctcggcaggcgagggttgctgcgcacgccggcagcacagcagctcaggtcccggcgccggtcgccgacctagtggctgccggcgagcgcagaatctccctcatttgcaccgacgttgacggcacgctgatgaacagccagaaccagctgacgcctggggtggagcaggcactcaatgcggcccatgaagcgggcgtgccggtggtgctggctacgggcaaggccatggggccctgcgtggcggatgtgctgccccgcctccgct

SEQ ID NO: 82 - DNA, 375 bp, Chlorella vulgaris
caaacatggagcgcatcatgaaggcgcaggcactgcgcgacagcagcatggccatgtacatgagcagcaagaagacgctagagatcaaccccgacaacgccatcatggacgagctgcgcaagcgggccgacgccgacaagagcgacaagaccgtcaaggacctggtgcagctgctgtttgagaccgcgctgctggcctcaggcttctcgcttgacgaccccaacacctttgccaaccgtatccatcgcatgatcaagctggggctgtcgatcgatgaggaccttgaggcgctggatgctgatgatgctgacctgccagagcttgaggagaatgtggatgagggcagccgcatggaggaggttgactaagcaacta

SEQ ID NO: 83 - DNA, 317 bp, Chlorella vulgaris
gggccatgtcttctttccgtgtggttggcataacattgagcagcagttgcctggtgtcagcttgagtcccggcctgtaccagtaagtgagttggtaaaactgtccctcgtgcaaggggttgcagttgcctgggatttgaattacctgctcagtgtggcgcttgaacagcctaggcgttgccctgtagcttggccaatggcagatgcacaagtgggtacctgaaggacaatgaaatggagatgcctctaaaaaaaaccgaaggacagaatgaagcacatgaaccctggcgccaaaagtcacgtgggagacctggaccc

SEQ ID NO: 84 - DNA, 361 bp, Chlorella vulgaris
gtttgaagggccctggggccagtggctgtcgaatgccccatttgattgctttacaaccaggcgtttgacagacattattggtcccagccgccttcgttgtagtcagcagggttcgcatagcagccaaagtcaggcgcccaccgtgtgtgccgtcctgccccttatgaatgtattcagcgatctgctgcatttgctttttggctgggtgtgagctgttgttttcggcgtgcagttcgcccctgtaacagcacgaggtaataagcactaataaactacacaaaccctgacgccatcagccataaagaaaatcctgaagctgtacaaggactacattgaacccgaattcagctggaacaacttc

SEQ ID NO: 85 - DNA, 426 bp, Chlorella vulgaris
gggcttcaaggaggccgacaagcccaacttcaccggctcctactactcctacaccaaggccatgctggagtcgctgctgcgggaataccccaacgtgctgatcctgcgcgtgcgcatgcccatcgtccaggacctcacttatgcccgcaacttcatcaccaagatcatcaagtatgagaaggttattgacatccccaactccatgactgtgctgcccgagctgctgcccctggccattaagatggccaagcgcaacctgacgggcgtcatgaactacaccaaccctggcgccatcagccataatgaaatcctgcagctgtacaaggactacattgaccccgagttcagctggagcaacttcaccgtggaggagcaggccaaggtcattgtggcgccgcggtctaacaacctgctggacaccgagcg

SEQ ID NO: 86 - DNA, 428 bp, Chlorella vulgaris
  unsure (1)..(428): unsure at all n locations
ggaaggcagtgcatctgctgaggaccgaaacggacaaccatgcagattttctgcaaaacagacaggactcatgtccttgagcttagctccgaggccactgtggccgatgtcaaggctgccatcgaggccagccagggcatcccctgcgatgcgcagcgtgtgatgttctctggtcgccagctggaggaggaggcctccctggccgcctgcggcgtgtctgacgacagccagctgtacatcctgatgcgcctgctgggtggtgccaagaagcgcaagaagaagacctacaccaagcccaagaagcagaagcacaagcacaagaagatcaagctcagggtgctcaagttctacgaggtanacgacagcggcaaagtgcagcgcctgcgcaaggtttgcccccagtgcggccccggcatcttcatggccac

SEQ ID NO: 87 - DNA, 322 bp, Chlorella vulgaris
tgtaggtgcacctgacaatgaaggtagcattcttccatctgccgctggtacatcccgctctatgctgggtgtacaacctctaccatacagccagcgttgcgcggcgcagtaaggggatttacagcagttcaacaaaaaaaaaaaaaaaaaaaaaaaaaaaaaaaaaaaaaaaaaaaaaaaaaaaaaaaaaaaaaaaaaaaaaaaaaaaaaaaaaaaaaaaaaaagaaaaaaaaaaaaaaaaaaagggcggcaccccaaaaggaattaaaaaggacaatacctctacaacaacggaaaaaaaaaaagggggggcgcccccaaa

SEQ ID NO: 88 - DNA, 362 bp, Chlorella vulgaris
cccactcgtctggcccaacgctgcttctggcgcctggaggcgcccccgctgcgcgttacaggctgggacacccccttccccctcatctacgaggcgctctacctgccctccgtcaagctggtggctgatgccctgcgcaaggtcgtccgctcctgggagctagacctcaacttacagggctacggccacaggagtgtggctgctctggctggcttggctgctctggctgggtgtgctgggcggcccttgtctagtggctacgagcacacagcggacctccgtgaagctgctgtgccatcacacaaatgtgctggctggtgggtggcatatggctctttcaagactccgtgtgtgggactggg

SEQ ID NO: 89 - DNA, 382 bp, Chlorella vulgaris
cggacgcgtgggggactgccaaaagtgcaaggaagacattgaccccttcaaatactaccacttcggcatcaaccgccccgatcagctgagcaggagcaactttgctgacgacgtgctggaggggccggagccggccaagccgctgtgcagcatctgcaaccgggaggtggacaccattatggaggcccactgccttgcatccacgggcctccaatgcgaagactgctgtggcttcgaccttgactgagtgacaagagggccacggcgtcttccttccaaccgccgagtttagcatgtcaagcagggagcaaccaaggcagctccatatctctatgcagctgtctttttggtgtgtaactgttcctgtcttgagtacctgcct

SEQ ID NO: 90 - DNA, 394 bp, Chlorella vulgaris
caagatcactttggtgcacatgtggagcggcgacaagtagagctgcaagaagccggtgcagcttccgctcgggtagcagcaacagaagcggaggcctcgcatgaacgtctcccacaactggaacgcacgtcatcgcatgactcggacaatggaagggtagaggccccggatgtgccgctgctcaggccagcaggcgcttcctcacaccatcaccacaaggagcgaccacagtcagcgccgacgtctcgaggcttaagccgggacaatgagggggcagctgctgtgcagcccagcgctgtcagcgccccgtcagcggtagcggagcccctccgagttggcgcaggactgcatctcagaccggaagttgctgctgagcttgaggcacacccagatg

SEQ ID NO: 91 - DNA, 169 bp, Chlorella vulgaris
  unsure (1)..(169): unsure at all n locations
cccacgcgtccggcgattcgaactaacgcctatccgatgcttcctcgaagacacaagacatcaacatgtctgacggaggggacagcccgaagcgccgangccccgccgctgccgcggctcccgccccggcgagcccatggacatcaacaccggcatccagctggtgctc

SEQ ID NO: 92 - DNA, 296 bp, Chlorella vulgaris
atgacacccatgcgcaaccggctaagacactgagagaccgtcacttgcaggatgcgtttgcacagttgacacgtaagcatgtgactgaccaaacgcgaagccttggactactgtggggctacctcactcctcttgtattgccagccatttttggcttgtatggcctgaagaccttcaaggaccagccggtcctataggaacaccatctttgcaggtcagagcggcacagtggtcatctatggtcacaccaacatactgaccggacccccagaggctagggggtatacggaggccat

SEQ ID NO: 93 - DNA, 428 bp, Chlorella vulgaris
  unsure (1)..(428): unsure at all n locations
tgaagggctcccttcagtttgagggtgtgcaagccggctctgacggatacagcacagggtttggggtgattgccacgccctacaccgcccttaccgagctcacagaccaggacggctgggtcattgtgtcgtctgatggcctcaaccccaacctggagcgcggcagcgggggtggcctgagcaatgacgaggtggtatccacgtgcgagaggatgtccgcggcaggggcctcctgtgacaagattgcgcaagccctggcccaagcagcagtgaaagctggcagcaacgacgatgtcaccgtgtttgtgctcaagctcaagtaatggccggcttctccaaacggcacagggatgctctatgttgtgtatgcgctctttgtanactgcaattctcttgtccggttgtgcacccctggaatgtctttgact

SEQ ID NO: 94 - DNA, 423 bp, Chlorella vulgaris
  unsure (1)..(423): unsure at all n locations
gtctcacaccgcttcagcaagcaacatgaaggcttccctgctactagcagtcctggccctggcggccaccgcacgtctaggccaagcaaacgtgttggaagttgcacagaacgtgaccgacctcagcaccttggtcttggcagtggaggcggcaggcctggcggaaacaatagctaacctgaccggccctgccactctcctggcccccaccaacgaggcctttttaacagctttggctcagattgagcaggcaacaggcctctcaatcaccggctttgaggacattcctgaggagacactggttgcgctcctggcctaccacgtcctgcccaagcagtactctggtgcccagctgctggccctggcgcctgctgtccttgacacctacttgaccaacgcnaccctcgtggtgggcggggctga

SEQ ID NO: 95 - DNA, 431 bp, Chlorella vulgaris
cccacgcgtccgggaaggcagtgcatctgctgaggacctaaacggacaaccatgcagattttctgcaaaacagacaggacgcatgtccttgagcttagctccgaggccactgtggccgatgtcaaggctgccatccaggccagccagggcatcccctgcgatgcgcagcgtgtgatgttctctggtcgccagctggaggaggaggcctccctggccgcctgcggcgtgtctgacgacagccagctgtacatcctgatgcgcctgctgggtggtgccaagagacgcacgaagaggacctacaccaggcccaataagcaaaagcataagcacaagacgatcaagctcatggtgctcaagttctacaaggtacaccacagctgcaaagtgcagcgcctgcgcaaagtttgctcccagtgcggccccagcatctt

SEQ ID NO: 96 - DNA, 426 bp, Chlorella vulgaris
cccacgcgtccggcgggcaagatggtgcagcgtctcacttacaggcggcgtcacagctacgccaccaagtccaacaagcagcgcctggtgaagacgccaggtggcaagcttgtgtatcagctgctcaagaagccgagctccatcccgacttgcccgatcagcggtcagaggctgaacggcctgcccgctcgccgccccgacaccctctctcgcatcagcaagtcaaagaagaccgtccaccgtgcttatggcggccacctcagccatgctgtcgtgaaggagcgcatcatcagggctttcctggtggaggagcagaagatagtgaagaaggtgctcaagctgcagaaggccaaggagaaggcagctgaaaagaagaagtgagcagcggcagcgcagtgttgtcgttggcagcagcggacagcgagc

SEQ ID NO: 97 - DNA, 343 bp, Chlorella vulgaris
cttgaggcgtataacgtcaagatgccgtcccagaaggcttttgccatcaagaagaagctggccaagaaggccaagcagaacaggcctatcccgccctggatccgcttcaggaccaataacaagatcaggtggaacgccaagcgcaggcactggcggaggaccaagctgggcatctaaacggccagcattctcgctttcttgtcggcattgcagcttgggagtgcagacgcctggcctggccgacctttattgttgcggcagcgcagcagcctggcggaaggcagtagcaaccgcagctggggggcagcctcctggcccatgcagtaatgtaacaacctacgct

SEQ ID NO: 98 - DNA, 394 bp, Chlorella vulgaris
ccctgctctgctgggttctgctgtcccttgaagtctcttggtggccaggtaaaagtaccatcatgcagtcggccatgttcaccagcaccagggtggcgtctgccaggcccagcgtggccgtgaacgccaagaaggccgccgccaagaacgcaggcaccggcactcgtgtgggcggtgctggctacaggcagtacagcggcgacgctttgtggctgcccaacaccactcgccctgagtggctggacggctctctgcccggcgaccgcggcttcgatccactgggcctgtccaagcccgctgagtacctgcaggtcgacctggactccctggaccagaacaaggccgtgaacaaacccggcggcgttgtcggcaagttcacctccgtctccgacgt

SEQ ID NO: 99 - DNA, 359 bp, Chlorella vulgaris
aaaaaaaaaaaaaaatataaaaaataaataaaaaatataaaaaaaaaaaaaaaaaaaaaaaaaaaaaaaaaaaaaaaaaaattaaagaaaaccaaaataaaaatttaaaaaattaaataaaaaaaaaaaaaaaaaggggggcccttcaaaagttttaaattttatttaccctttaatgcaactttaaactttttcaaaagtgtccccaaatttcatttaacgggccttttttttaaaacttcttaacgggaaaaaccctgggttttccaaatttaatcccttttaaaaaaatccccttttcccaatttggctttataacaaaaaggtcccaacccttttccctttccaaaaattttccc

SEQ ID NO: 100 - DNA, 432 bp, Chlorella vulgaris
  unsure (1)..(432): unsure at all n locations
tctcactgtcgaacccgtctcgtacctaaatcctgtattacgtccaaggagggtccctgattgccagcacccaagaccatctgtccccttgcttgagtaaaactagcaggtttaaaaatgtgggatcttgttgctaccgccgctgctgggctgcacgctggtgcaggtctagcttgtgtggccgtggagcatcctgcaggcttggagacaggagttggcgagtattgggctctctttcccaaaagctcgacccgcggcctgaccctgtctaacgtgctctccgtcgtctcttgcggagccgcgctgggcgcctacctctccgtgcctgagggcgagcgggacccggcttggatcaccgccgcaatcatggctggtgcagccatcccgtacaacctgctcatcctgacgcccaacanaacagtgattgacgag

SEQ ID NO: 101 - DNA, 432 bp, Chlorella vulgaris
cggacgcgtgggcggacgcgtgggctgaggcaagccgggaatcgagttggccttgagccgacgcgtttgacgcccgcagcagcacctaacacacgcaccaggcaccatgctcatctccaagaagaacaggcgtgaggtgtacaagttcctcttcaaggagggtgtgctgtacgcggagaaggacttcaacctgccggagcaccccgagattgagggggtgtccaacctggaggtcatcaagctgatgcagtccatgaagagcaaggacttggtcagcgagcgctatgcctggcgccactactactggttcctgacggacgcgggcatcgagcacctgcgtgagtacctgaacttgcccagcgagattgtgcccgccacactgaagaaatcgaccaggcctctggagcgggagggcgcacgcccgccgcgcgg

SEQ ID NO: 102 - DNA, 421 bp, Chlorella vulgaris
gaccctcaagacttactatcagctgcatttcagccagtagaacagagcagtcatggcgtcccagctgcttgccacccgccctggcctccgtgtggcccctgccaccagcactcgcctgagccgccgctccgttgttgtgaaggccgccaacctgagcaccatcgagaagcagtacaaggagttcagggtcccccagatccctgtggccaccgtgtttggcattgccggctggctggtgcccgctgctagccccgcccctgccttcggcggtcgctctctcctgagtgtgttcaccgagagcatcggccaggagctttcccacttccccaccggccctgctctggactcccagttctggctctacctggccattttccatgttggcctattcgccaccatgttctttggtctgattggcgtc

SEQ ID NO: 103 - DNA, 412 bp, Chlorella vulgaris
  unsure (1)..(412): unsure at all n locations
gtcgcggctcctgcaaacatgggtaaggtccacggctccctcgcccgtgccggtaaggtgcgcggccagactcccaaggtccccaagcaggacaagaaaaagaaccccaagggcagggcgctcaagcgcatcaagtacaacaggcgttttgtgaatgttgtggttggctttggcaagaagaggggccccaactcccagtaaagcctgagcctgggtcaacagaggccgccttgccagagagatgtaaaaggagttccgctgggggcgtggcacgagacttatgcagcctggcagtcacagcggggcagtcatagccaggcaggaccagcggaggaccactgcagtgacatatcttggctgtcagcttcccccgatgtaagagcttcagcgccgaaaaaaaaanggggtgctg

SEQ ID NO: 104 - DNA, 425 bp, Chlorella vulgaris
catcaatccgtctctggagccttccccggctgagaaggagacgtcaacatggtggctgccagcaagaagagcaagaagtctcatgagagcatcaactctcgtctggcgctggtgatgaagtccggcaaatataccctgggctacaagaccactctgaagactctgcgcaacggcaaggccaagctggtgattatcagcaacaactgcccggctgtgcgcaagtctgagatcgagtactacgccatgctctcaaagactggcgtgcaccactacaatggcaacaacgttgacctgggtacagcctgcggcaagctgcaccgcgtgtcagtgctgacaatcaccgaccctggtgactctgacatcatcaagaccaccagcgagtaggtgctcacctagcaagagggggtgctggaagtgacttacga

SEQ ID NO: 105 - DNA, 377 bp, Chlorella vulgaris
cccacgcgtccgggttaaactgcttcggttagggaactgaaggtcgccggttcgatccctgccgccccggacctagagccggccactttaggtcaaccctgtacttcgtacttggcttcaaagggggagtttgcgaccctagttgttaactagagatgttgtgcctctagttggttctcctccacctatctacagcgtctctctcgggaggtcgccgtgggacaggtttccaaaaaaaaaaaaaaaaaaaaaaaaaaaacgccagcaagggtaggttgacacttgcaagcaggcggcaggtgctgcttcctttacttgtacacgcgttggaaacctgtaccaagtgtgctgtgtcctaggtaatggcactgactgtt

SEQ ID NO: 106 - DNA, 374 bp, Chlorella vulgaris
ggaagagctgacgtgcatctacgtgggtagaggcctgccgcaccgcctggcccgcgaggtagccgaggctctctccaagcaggatgtcatccgggctcacgcacgagatgaactagggatagacctggatcagctggccaacccccttcaggcagggctggtctcaactgcctgcttctcagttggagctggcctgcccatcatagcagcttatgctgtcgatgactatacccaacgcacggctgctgtggctgctgtgtcgacactcgggctggctgcttttggttgcctgggagcgaagctgggcggtgctagcatgctgacaggcgggtcacgagttgtactgggcggctggctggcaatgggtgccacct

SEQ ID NO: 107 - DNA, 427 bp, Chlorella vulgaris
cccacgcgtccgccagcctaggtgcttcctccaaccaagatggcggagaccaagatcaaactcgttagctctgatggccaggtgttcgaggtagaggaggccgtggcccagcagtcggtcaccctgcagaacaccatggaagagattgacgcagcggacgagcagatccctctgcccaacgtcagcggcaagatcctagccaaggttgttgagtactgcaagtaccatgtagatgcagagaagaaagatgagcaaggcaagcctgccaagtcggaggatgaggtgaagacctgggacacggagttttgcaaggtggaccaaggcacgctgtttgagctcatcttggccgccaactacctgaacatcaagtccttgctcgacctcacatgcctgacggtggccaacatgatcaagggcaagacgcccg

SEQ ID NO: 108 - DNA, 376 bp, Chlorella vulgaris
  unsure (1)..(376): unsure at all n locations
cggacacatgggcggacgcgtgggaccggcttcacagtgtcgaaccggaccacgaaggtccgtattgtgggcaagtacgggactcgctatggtgccagtctgcatgtgcagattacaaatattgaggtcagccagcattccaagtacgtcagcaccttctgcggcaacgttctccattaagcgccaggctgtcagcatttggcattgcaaagcctgcaagaagatccatgctggtggcgccaaagtgtgcaacaacgctgccgccgtgactgtccgctccaacagtcgccgtcatcacgagcagattgagacgtaagcagccagacccaganaagcatccgctatatcagcagcagccgaagcactagccgaccgt

SEQ ID NO: 109 - DNA, 393 bp, Chlorella vulgaris
cggacgcgtgggagcgagcctctctcccccctcaggtcctcactgcaagtaagaggcaatgtcaggcgttggcaacctgggcggcggccctattcctgctttgcagaaggcccaccaagccgcggctggctttacttaccagaagagcggcgtgctaaccagacgcgtaatccctcttgctttcactgctgccgcttcgtttgctctggtgacgggccttttcggcatgtacacgggcaaggggaagagggattgagagctctctgtaatgcccagcacctaggagctgccaagctggtggtcaggactgtgcgctgccgttaaggacaggagcgctgggatgctttggcactgatattgtgtaaagaccctgtgtgtaccaaagcgctgtat

SEQ ID NO: 110 - DNA, 390 bp, Chlorella vulgaris
cgcgttagcagccgacagccgcacaatatggccgagtcggtgcagaccttcgggcgcaagaagaatgcagtggctgtggcctactgcaagcgtgcaaagggggagctgaggctcaatggctcccctctggaccttatccaacctgacaccatgcgctacaaggtgctggagcctgtgctgctcctgggcaaccaccggtttgccaacgtggacatccgcatccgcgtcaagggcggcggccatgtgtctcaaatctacgccatccgccaggccatcgccaaagcgctagtggccttctaccacaagtacgtggatgagcagagcaagaacgagatcaaggacatcctgctgcagtacgacaggacactgctggtcgccgatcctcgccgc

SEQ ID NO: 111 - DNA, 432 bp, Chlorella vulgaris
cccacgcgtccggctgtgcctcacccaaggtcgcaagacaccaaagcttggtagtcagggcggagcgtggcagcggcggggggttctggcctggcttcatcgtcggcggcaccatctttggcgtgcctgggtttgtgtttgctccgcagatttccaaggcgctccttggcgaggaccagaagctgaagctgccgcgcttcttggatgagcaggaggacccagaggttacaaagcagaacctggcagacaagattgcgcagctcaatgccgcgatcgatgatgtgtcctcgcagctcaaggccaatgattcaactctggtcaaggaggaggccagcgcctaggcagccttgggtcgcctctgcaagagccttgtacatgggcccactcggtttgtactggtaccccgctgttcccttgctgactgagggtgtg

SEQ ID NO: 112 - DNA, 399 bp, Chlorella vulgaris
ggacgtgcggcagcagcgacgatggtgctgtcgtgcgacatcgatctcctgcatcctccccaggagctggagaagcggaagcacaagctcaagcgccttgtagcttctcccaactcctatttcatggacgtcaagtgccaggggtgcttcaccatcacgaccgtgttcagccactcccagacggtggtggtgtgccccagctgcaacaccgtgctgtgcgtgcccaccggcggcaaggcccgcctcacagagggctgctccttccgcaggaagggcgattagtcatgggaggcgctacgctggcatgtggtctcaagaaagtgcgccgccgcggcttgaggactcttgccagcgggacagcgcggcctatcaggacatgaacatgaatggagcgaagaa

SEQ ID NO: 113 - DNA, 432 bp, Chlorella vulgaris
gtttagttaggtgcagcaaccatggggcgccgcccagcaaggtgctaccggcaaatcaaggggaagccgtaccccaagtctcgcttctgccgtggtgtgcctgactccaaaatccgcatctacgacgtgggcgcaaagaagtctggcgtcgatgccttcccttactgcgtccacatggtcagctgggagaaggagcacatctcctctgaggctcttgaggcggcccgcattgctgccaacaagtacatggtgaagaatgcgggcaaggacgcgttccacctccgcgtgcgcgtgcaccccttccacgtgctgcgcatcaacaagatgctttcgtgcgccggggctgataggctccagaccggcatgcgcggcgccttcggcaagccctttggcgtggctgcccgcgtcggcatcggccagatcctgctctcc

SEQ ID NO: 114 - DNA, 413 bp, Chlorella vulgaris
ggaatggcgttccgatagagactctactggtttcgtatatctcaaccagttacaggtctgatggacgcgaacacgtgagcgtacaaccaagtaccgtgcctttctaaagcagtgcagtcaccataagaatgcctacagcagtcacaaatgcaggcttgtcatccacttcacaattacttacgttgtgtgataacttgcatattccacactctcacgatgatgtaggccacagcacataatgcgcttatgaacggcacagctatgctgtaaacgtgcctgtgaaaactcacgtaaatgcctacggcatgagactacttctgaccaatcgcgtgcctactacattcgatctggcagcttagtactacgatactatgcctagcacaggtcacgatgaacacgtgcacgcatcagca

SEQ ID NO: 115 - DNA, 359 bp, Chlorella vulgaris
cccacgcgtccgcccacgcgtccgcccacgcgtccggggaagcgcacactcagctatcgtcttagagggtgtcagttggtatctcttgaaccggtgctaacgcgttatcttgagggagagcagggccatcccgggccgcacctgttcaaatgggtccccagaagcactatcagaagtggagcacgggcctttgtgggtgttttgaaagctgcggcacctgttgcttcggtttctgctgccaaccatgcctgtatggccagaacgctgcgaagatagagggccgggacagctgctgcgtcaactgcttcctttactgcatcctcagtcactgcctcatctgcgcttgcctggccaagggc

SEQ ID NO: 116 - DNA, 427 bp, Chlorella vulgaris
ggaacatataaattgaatccatttcgggtagctgccttccttttttgacagtccggccgtactgctgcaagcgttgctgcgagttgccctggttttgtcaacaaacagggcaataccactctctctaacacttctcaaccatcgccgggcgtcatggctgagagctgggatcccaacacacgggcgacagtgcagaaaataccgctcctcacagtcaaagcgggccctagggagaaagaggactggcaaaagcggctcaaggaggagctgcaagccttgatcaaatatatagaaatcaacaaagccacggacatggactggttcacaataaagcccaacaaggatggcacacactgggagggcaagtgctggtatatccatgagtacatcaagtacgagtttgacttccagtttgacatccccgcca

SEQ ID NO: 117 - DNA, 429 bp, Chlorella vulgaris
gtccaagccccttcagcaaaagatccacgatgcagaccgcctttgtccgctccggcctccgtgccgccgtccccaccgctggcaagggcacccgccaggtgacccgcgcctctgtggagtggtacggccctgaccgcgccaagttcctgggtcccttcaccaaccccccctcttacctgaagggtgagttcgctggcgactacggctgggacacctctggcctgtccgctgatcccgagaccttctcccgctacagggaggttgaggtgatccatgcccggtgggccatgcttggcgccctgggctgcgtcgtgcccgagctgctggaccgcaacggcaccgtcaactttggcgagaacgccgtgtggttcaaggctggtgccgccatctttggtgatgacgggctcaactacctgggcaacccctccc

SEQ ID NO: 118 - DNA, 393 bp, Chlorella vulgaris
ggctgacagtgctagacctggtttgcaagcccctaggtggcgttcctgacgccgtaggcgcgtcttgcctttccggcagggagcaaagttccgctcttcgcagaggtgtagtgaccatttttatataccacctctacaatgaggttggagaagtgctggttttgctctagcaccgtataccccggccacggtattacctttgtcaggaacgatgccacagtgttcaagttctgccggtcaaagtgccacaagaacttcaaaatgaagcgcaacccgcgcaaggtcaagtggacgaaggcctaccggaagcttgccggcaaggagcttgcagaggatgccacctttgaaatggagcggcggcgcaacaggccggagaagtatgaccgggaactg

SEQ ID NO: 119 - DNA, 344 bp, Chlorella vulgaris
gaaagcaggagctcgtgcatcacagcggatgctgagatggagcggctaaaagatgacatgcaagtgttggctacacctgagcagttcttcggctcgaacagcctgacactccggcatgagtcatccggtactgccttaaccttcaatgccctcgacgccttgagaggctgggtgaaagacaagtcgcagccagtccagataggggacgccccactctggcagcagtcgaggcggagagatatggaggaaacgggagccaagccgttggagtatgactggaccttcaccacctcctacactggcagcctggggcgggcagctgacggcactgctggcgccgccga

SEQ ID NO: 120 - DNA, 348 bp, Chlorella vulgaris
cgaggacctttgcggcgcccttttgctggctggcgcctcaaggggccctgtggcgagtagtaggatctgagagcagcctcctgccgcggtcgtgacgtagttaaggcgggcctcaaccaccagcatggcaagagctggtttagctatacgatgcctttcacctttccagccgcagtttttctcatttgctttaactatcctgctgggtactcctggataggcccacgtaagccaggtggttgctcgcccacttcaccctgggaatggctgtggcagccgcttttgaacaggctaccggctgtcacgccgactgttggactggtgcatttgtaaatggacatgccaaaa

SEQ ID NO: 121 - DNA, 414 bp, Chlorella vulgaris
cggacgcgtgggccgtctcgcaatagttccagggcaatcactatgcaggcaaccatgatgaagaccttcggcgccagcctgcgcaaggctgtgcccacccagggcaagggcacccgccaggtgacccgcgcctccgtggagtggtacggccctgacagggccaagttcctgggccccttctctgagggctccacccccagctacctgaagggcgagttcgccggcgactacggctgggacactgctggtctgtctgccgatccccaaaccttcgctgcctaccgcgaggttgaggtcatccatgcccgctgggccatgcttggcgccctgggctgcctgacccccgagctgctgcagaacgccggcgtggccagcttcggcgacgctgctgtgtggttcaaggctggtgcctcc

SEQ ID NO: 122 - DNA, 215 bp, Chlorella vulgaris
cccacgcgtccggttcagttacagcggccaacatgcgcgcgaagtggaagaagaagaggatgaggcgtctgaagaggaagcggcggaggcagagggcaaagtgattgcacagccccgcctgcaagccagcggcctgcagccttggaggatgcagcagccagctgcgtgtgcgcccgatagtctgacagcgctctttaatgtaacatctgcgcgtc

SEQ ID NO: 123 - DNA, 428 bp, Chlorella vulgaris
gagtcaccctggggcccctcatcacacacaaggcggtgaagggggtggaggagaaggtggctgatgctgtgcagcacggcgccaaggtggtggtaggcggcagcaagcctggctttggtggcggcagcccactgggcgggggctccttctttgagcccacagtactgacagaggtcacgcctgacatgcgggtgttccgcgaggagatctttggccctgtcacccccctctacaagttctctagcgatgaggaggcggtgaggctagccaatgccacagagtatggcctggcagcctacttctacacccaggacctgtcgcgcgccttccgtgccgcggaggcccttcagtacggcatggtacgctgcaacgaggtggccatcaccagcgaggtggcgccctttggcggcgtcaagcactcgggcatg

SEQ ID NO: 124 - DNA, 287 bp, Chlorella vulgaris
cccacgcgtccgcggacgcgtgggcggacgcgtggggcaatggggcgtaagagccactgcttgagagtgttgggcagccagtcagcgggagtagcagcagctgggaggcgagagcggaggcatgggtgcaaccggggcctgtggcgaagcgcacatctagaaggcggcagctgggcagcagaggcagcagcgggggctggttgcgattgcggctgtcagtcacaggctggtggtggtggggctcccccgtaaggctgcgtggagcaagggtgtaaccactgagaatg

SEQ ID NO: 125 - DNA, 359 bp, Chlorella vulgaris
gtgccaccaaagccgccagaatgcagaccaccttcgtgggcaccacccaggcgctgcgcgccaaggtctccacccaggccactcgtggctccaaggtagcaacctccatgcgccgcaccgtcaagtccaagaacgtgaagaccaccgacaccagccagtggtacggtcccgaccgccccaagttcctgggccccttctccgagggtgctgtgccttcctacctgaacggcgagttcgctggtgactacggctgggacaccgccggcctgtccgccgaccccgagaccttcaagcgctaccgccagattgaggtcatccatgcccgctgggccatgcttggcgccctgggctgcatcttg

SEQ ID NO: 126 - DNA, 390 bp, Chlorella vulgaris
cccacgcgtccgcccaagcgtccggaacatacggtgttattcccgtttgggttaaagttgctttcaccgtccgccaaaacagaacatgaagctggtcgctgcttacctgctggctactctgggtggcaaggatgccgccatcgcctaggacatcacgtccatcctgtccaacgttggtgctgaggccgataacgagctccttaccaagctgctttctgagctggtcggcaagatcatcaacgacgtggttgcctccggcctgtccatgctggcctctgtgcctgctgccggagttgcctcttcgggcggtgctgcccccgctgctgctggcgctggtgctgctgacgctgctgcccccaaggatgaggagaaggttgaggacgacgagga

SEQ ID NO: 127 - DNA, 397 bp, Chlorella vulgaris
agggtctttcaccatggtgacgcctctcatcaaggtgaagagcgtcaagaagcgcactaagcgcttcaagcgtcaccagagcgaccgtaagatctccgtcaaggagagctggaggcgccccaagggtattgactcgcgggtgcgcaggaagttcaagggatgcggcgtgaatatgcctaacatcggctatggcaccaacaagaagaccaggcacctcctgcccaacggcttctacaagtttgttgtgagcaacgtgaaggacctggagctgctgatgatgcacaaccgcaagtactgcgccgagatcgcgcacaacgtgtccaccctcaagcgcaaggcgattgtggagcgcgccggggagctgaatgtcaagctcaacaatgccggcagcaggctg

SEQ ID NO: 128 - DNA, 389 bp, Chlorella vulgaris
cccacgcgtccggcagcccacaagttgctcctagccgctgtgctgagcctgtgggcgttggtgctgggtgtcggcgcccaatccaagctgagcaaggagcgaatggtcttccaaaccgactttggcgacatccatatggctttctacccagaggtggcgcccaaaaccgtagcccacatccgtcgcctgggggagctgggcgcttacaacaccaaccacttcttccgcgtggacaagggctttgtggcacaaaccgcggatgtgctgagtggcaggaaggcgcctctaaatgcgttgcagaagctggtggcgggggagaccgtgcccttggaggctgttgatggcgtaaagcacgacaagcgcggcatcctgtccatggcgcgccacgc

SEQ ID NO: 129 - DNA, 393 bp, Chlorella vulgaris
ccgacatgtcctccaacttcctcagcaagccggtggacgtgagcaagtacggcgtcatctacgcgggcgcacagaagaatgtgggccccgccggcctgacagtcgtcatcgtgcgcgatgacctgctggggaagtcgaggcccatcacccccaccatgcttgactgggcgacccaggccgagaacgactccatgtacaataccccgccgtgctgggcaatctacatctgcggcctcgtctttgcgcgcgccctggagcaggggggcctggcggcggtgcagcaaaacaacgagcggaaagcccggctgctgtatgacgccatcgaggccagcaacggctttttcagctcgcctgtggaccccgcggtgcgttcgctcatgaacgttcccttca

SEQ ID NO: 130 - DNA, 278 bp, Chlorella vulgaris
gccttcccttccctctgatcgcgcctctgggcggtgctctggtttgggctgggctgcggcagagagtccaccttcttccccagccagggcggtgccccacagcctcacaagcgggggatggggcaactgggtgatcaaggactggaaggaaacggagcgatggactggggtgggttggcgagcagcaacgggctacggggtgacggggctcctgcgggcatgaatggttgagcaccatcattggtacatgcagttaacgaggtgattctgacttcctg

SEQ ID NO: 131 - DNA, 403 bp, Chlorella vulgaris
ggcagctgcagcagtcaaggagaacgtatggaagtacccaaggccaccaaggctggaacagacgcccaagcacctgcgagtgctcctcaacggggaggttgtggctgactccaagtctgcttaccgggtgctagaaaccagccacccgccagcctattacatcccgccctcagacatcaagcaggacctggtcagcaagtcggctggaggttcgacgttctgtgagtggaaaggatctgctacgtactgggatgtgactgtcggcggcaagaccgtccagcgtagggtgtggtcatacgaggacccaacccccagcttccagcccattaaaggctacctttcgttctatgcctcgcccttcacctgcttcgtggacgatgaagaagtcgtgccacagccgggt

SEQ ID NO: 132 - DNA, 118 bp, Chlorella vulgaris
  unsure (1)..(118): unsure at all n locations
agcaagcgtcngcctacgcgtccgggtcaaggacgcaatcaaggaaggtgggatgaaaggcgtggacctacgcctgtaacgggacatcggcggggaggccgtcgtcaaccctgcgacc

SEQ ID NO: 133 - DNA, 432 bp, Chlorella vulgaris
gacccacgcgtccgcccacgcgtccggcaaaatggcgagcaaggtgtccggcgaggtgctgcgtgagggtatcgctggggtgctggagggctccaagtccaaggcccgcaagttcacggagaccgtggagctccagattggcctgaagaattatgacccccagaaggacaagcgtttcagcggctctgtgaagctgccttactgcccccgtccccacctgaaggtgtgcgtgctgggtgaccacaagcactgcgaggaggcccagaacgcgggcattgacgcgatgagcgtggatgacctcaagaagctgaacaagaacaagaagctggtcaagaagctggccaagcagtatgccgccttcctgtcctctgacagcgtgatcaagcagatcccgcgtctgctgggccccggcctgaacaaggcgggcaagtt

SEQ ID NO: 134 - DNA, 418 bp, Chlorella vulgaris
ctagaactagtcgggggccgacatccgcagcgtgtgtacggaggcgggcatgtacgccatccgggcgcgacggaagacggtcacggagaaggacttcctggatgcggtgaacaaggtcatcaagggctaccagaagttttcggcaacgcccaagtacatggtctacaactagccaggcagccacgtgccagaggccccgggagcagcacactgggagcagtccattgccccaccacccagccagtcacagcatggcgccaggcgccaagagcacagccatgtctccatgtagccacaggaacgagatggaggggaaggccaggggtagccaaggcatgcagcgaggtcagggctgtgtgtgtgctttggggggtgccgggcgtccgagcaggtcgctctgcgagtattagtgtacatg

SEQ ID NO: 135 - DNA, 404 bp, Chlorella vulgaris
gaacaaccatggcgccaaaggagcagaagtccaaggaggccaaggccatggctgcggccaatgccagcaagggcaagaagaagaagtggtcaaagggcaagatgaaggagaaggtcaacaatatggtcaagttcgacaaggccacatatgagaagctgttgacagaggtgcccaagtacaagatgatcactccctctgtgctctctgacaggctcaggatcaacggcagccttgcccgtgccgccatcaaggagctccttggccagggtctcatcaaggttgtggccaaaagcgcaagccaggagatctacactcgagccaccgctgctgcatgattgactgaatgtttgaaggggcagctgtgttggaaggcttggcagatcccgatgtaaatgcacaagccc

SEQ ID NO: 136 - DNA, 422 bp, Chlorella vulgaris
gtcgcccccaagaagggtggcgtggagtggtacggccccaacaggcccctgttcctgggcccctacagccccgagcccccgagccacctgaagggtgagttcgctggcgactacggctgggacacctccggcctgtccgccgatcccgagaccttctcccgctacagggagattgaggtgatccatgcccgctgggccatgcttggcgcgctgggctgcgtcgtgcccgagctgcttgaccagaccaaccacgtgccctggttcaaggctggcgcccagatctttgcccccgagggcatccagtacctgggtgtggatggcctgatcaatgccaagagcattgtggccaccctcattgtccaggttgtgctcatgtcctttgtggagggctaccgcatcaacggcggccccgccggcactgg

SEQ ID NO: 137 - DNA, 429 bp, Chlorella vulgaris
tggacatcaccactgatggctttggctttatgctggcctttggcgaccttacctgggtgcccttcacctactccctacaggccaggttcctagtggaccacccgcaggtgctgtcatctgctgctattgctgccataatgggggttaaggcactaggctacctgacgttccggggtgccaactcccagaaagatacctttaggagcgaccccagccatccgcgggtggcgcggctgcgtaccttgaagaccgagcgcggcacgcagcttatcatcagcgggtggtggggcatcgcgcgacacatcaactacacaggggactggctgatggcgtgggcttggtgcctcccaacaggcttccagagcatcatcacgtacttctatgttatctactttggcgtgcttctagtgcaccgagatctgagagacg

SEQ ID NO: 138 - DNA, 389 bp, Chlorella vulgaris
tgagcggcttcacaatgtcgaagcggaccaagaaggtcggcattgtgggcaagtacgggactcgctatggtgcgagtctgcgtaagcagattaagaagattgaggtcagccagcattccaagtacttctgcaccttctgcggcaagttctccatgaagcgccaggctgtcggcatttggcagtgcaaggcctgcaagaagacccttgctggtggcgcctacgtgtgcaacaccgccgccgccgtgactgtccgctccaccatccgccgtctccgcgagcagattgagaagtaagcagccaaacccagaaaggcagccgctacatcagcagcagcccaaccactagcccagcgtgcaggcgccgtggatgccagtattttggggcgccga

SEQ ID NO: 139 - DNA, 417 bp, Chlorella vulgaris
cccacgcgtccgcccacgcgtccggcagcgcatgctggcagcctctcggccacagtcagaggccaagcggagacagcggccacgtgccggcggtttaagaggtggaggcgaggcgggccgtgtttctgatgctgcaaatgtcgtggagccagccggtgaggttgtacctgcagtgaagggactgacagagcatctaagcgaggcgaggctgggcggtggcaacgctcccggtagtggtggtgatgaggacgactggggccggggcaagaaggggcccaagcagcggggcaagggcatgggtgtgccccatgcgcagcaacagcagcagcaacagcagcagcaagcgcgttcatcgacacgaggggcagcagacgaggctcctgctgcaagcgtgaagctgtccgccaaggagaatag

SEQ ID NO: 140 - DNA, 389 bp, Chlorella vulgaris
cccacgcgtccggttccagctgcccgaacagctggccgccacgttcctggtgacagagggaccgtcatgcatattttcgtcaagaccctcacgggcaagactatcacccttgaggtggagtcttcggacactattgagaatgtgaaggctaagattcaggacaaggagggcatcccccctgaccagcagcgtctgatcttcgccggcaagcagctggaggacgggcgtaccctggccgactacaacatccagaaggagtccactctgcacctggtgctgcgcctgcgcggcggcatcatcgagccctccctgcagatcctggcccgcaagtacaaccaggacaagatgatctgccgcaagtgctatgcccgcctgcacccccgcgctgt

SEQ ID NO: 141 - DNA, 368 bp, Chlorella vulgaris
cccaactcgggtcgtgatcagccgaggatccatggcgagtgaggctgtgaaccccaaggcctaccccctggccgatgcgcagctgacgaacaccatcatggacatcgtccagcaggccaccaactataagcagcttaagaagggtgctaacgaggccaccaagactcttaaccgtggtatcagcgaggtggttatcatggctgccgacactgagcccattgagattctgctgcacctgcccctcctggctgaggacaagaacgtgccctatgttttcgtgccctcaaaggccgccctgggccgcgcatgtggcgtgtcacgcccggtcatagcgtgcagcgtcaccacatacgacggcagtcagctca

SEQ ID NO: 142 - DNA, 371 bp, Chlorella vulgaris
cttacaggtagtgagagtgccaccaaagccgccagaatgcagaccaccttcgtgggcaccagccaagcgctgcgcgccaaggtctccacccaggccactcgtggctccaaagtagcaacctccatgcgccgcaccgtcaagttcaagaaacgtgaagaccaagcgtcacaagccagttgttacggtcccaacggccccaatttccggggccccttctccgagggtgctttcccttccaacttgaacggcaatttccctggggacaacggctggaaaacccccggcctttcggccaaccccgagactttcaaccgctaccgcaaaattgaggtcatcaatgcccgctgggccatgcttggccccctgggctg

SEQ ID NO: 143 - DNA, 392 bp, Chlorella vulgaris
cggacacgtgggcttgcacaccttgttgttgtctctgccacacaacaattcgtaggctatacacgcctgcctgaccatgcagtccgccctgtgcggaaacgccaccagccaggtgttcgccgccaaggccaaaaaggctgtgcgtgtgagcaccgttgtacgcaccgaagcaactcccgctactgaggacaagaaagcttgcggggctcctaccctgaagcccgcgaccccctccaccatcttcggtgagatcaccggcggtctactgaggaaagcgcacgacgatgagttccacgtgatcacctgcgagtccatagagcgagcatgattgttgacatgcccagctgcggcactgctatcatgctccactgcatcatgctgcacaacctgtc

SEQ ID NO: 144 - DNA, 429 bp, Chlorella vulgaris
gtacaagcacgacaaggagctgttcatcgcccccgagggtgtgttctctggccagtacatctactgcggcaagaaggccaccctgagcattggcaatgtgaagcccgtgggcgacatgcccgagggtaccatcgtgtgcaacgtggaggagaaggctggcgaccgcggctcactggcccgctgctctggcgactacgccatcattgtggcgcacaaccctgatgccggcatcacccgcattaagctgccctcgggcgccaagaaggtgatcagcagcgagtgccgtgggaccgtgggccacgtgtctggcggcggccgtaccgagaaagccatgctcaaagcgggccgcagctaccacaagtaccgcgtcaagcgcatcagctggcccaaggtgcgtggtgtggctatgaaccccgtggagcatcccca

SEQ ID NO: 145 - DNA, 426 bp, Chlorella vulgaris
  unsure (1)..(426): unsure at all n locations
ctcctttgaccccctcaacctggccaccaaccccactgcgctcacctggttccaacaggcggagctgcacaacgggcgctgggccatgctgggtgttgccggcatgctgaccccggagctgggtgccaagctgggcggcttcatcggccccgccggcagggtgccatggtatgatgtgtccaactacgacttctgggcccccgcccccacactggaggccatctccttcttcctctttgccttcgtggagtgccgccgcctgcaggatattgccaagccctgcagcgtggacaaggcccccttcttcggccacgagctgaagggcgcaggcctgggctaccccggctttgaccccctgagctacatgatcaccacccccgagaagcagaacgagtggaagctcantgagatcaagaacgggcgcct

SEQ ID NO: 146 - DNA, 416 bp, Chlorella vulgaris
cccacgcgtccgcggacgcgtgggaaaatcctcaatttagcaatagagtaacacctaaacaatcaaatgcacttaaatcttttacaagaaagttatatatatctacttatatacaaaaaaacgcctcttttcttaattctagtttttctagtatttataagaaaaaaggaaatagtgctatttatagaaatatagtatataaaacaattttacaaatgcattctgattttttatattcgcccttgtccattaacgcttctcgtttctccattataaatggagaaccataaatggaggctcctacaggctttgcatggagaaaacctccatttaattctttatcagaagatagaagtaattctccatttacaaaggaaaaatctgtatcaagagatacagataatcctttgtctaaa

SEQ ID NO: 147 - DNA, 382 bp, Chlorella vulgaris
cccacgcgtccgggcctctctcggtagcccttagcaccttccgatcggtactatggctgccctgactgtgtctgccgccctggtgaaggcccccgtggccaccagcctacgcccggccaacaaggcccagcgggctgccttcgtgtccaatgccaccgttcagaagaccaaggctatgaatggtgtggactcctctgaacaacaagttcttccagaacttctcctaactgccaaccctgaccaacgattaaattgcccggcaagtccacttcgtcctggccaacggctggaacgcctggctttaattcgccgaacccggcaacggctaagtgttcaaccaaaacaccgttcccacaggccccgttaactggaactactaaga

SEQ ID NO: 148 - DNA, 384 bp, Chlorella vulgaris
  unsure (1)..(384): unsure at all n locations
ctgtctttagtggttaagtacccagtgtgtatatgtgtgtgcccttgtctgtgtcccctaggcagccaactgtctatagtcccagtgcaggctcagcctggctaggcaggctaggagtaggtgcgatgcttgaaccactgtacgcctgagagactatggagcgctgtgattcagggagggttcacgtttgctgtatgtgtaagctttgctaggttgctcctangaggcggcaggagaggctttgggaggccggctgcttttgtgcgtgttggcctggctgcctttacttgtgcgcagggcagatttgtaggtgctactgcttattcaacgagtgaggccgttttgaacacaaccatattactaccctgcctaagctgcctatat

SEQ ID NO: 149 - DNA, 385 bp, Chlorella vulgaris
cccacgcgtccgcccacgcgtccggtgccaccaaagccgccagaatgcagaccaccttcgtgggcaccacccaggcgctgcgcgccaaggtctccacccaggccactcgtggctccaaggtagcaacctccatgcgccgcaccgtcaagtccaagaacgtgaagaccaccgacaccagccagtggtacggtcccgaccgccccaagttcctgggccccttctccgagggtgctgtgccttcctacctgaacggcgagttcgctggtgactacggctgggacaccgccggcctgtccgccgaccccgagaccttcaagcgctaccgccagattgaggtcatccatgcccgctgggccatgcttggcgccctgggctgcatcttgcc

SEQ ID NO: 150 - DNA, 419 bp, Chlorella vulgaris
  unsure (1)..(419): unsure at all n locations
cccacgcgtccggaattacacaaggcacatcatggcagggcctcaggcacctgcggtcttagggcttgctgttggcatacttaccctttgctgctcaacgtctttgacactgtttgcacgatgcgataacccagtanaagctgggctgccgactcagcagttctggtacaatgatgttacccaggagagcgtgtggagcaagcctgagtatgaattcaaggacgaggagtcccgcacatactacgtagacccagtttccaaggcggcatcctgggacaagccagaagccctgcagtggctagaggcaacggacgagcagggtaggacgtattattttaacgaggtcagtaaggagacaacctgggacaaaccttacatcctcggctggcggcaaatcccggtctccgaaggggacaaga

SEQ ID NO: 151 - DNA, 418 bp, Chlorella vulgaris
  unsure (1)..(418): unsure at all n locations
cccacgcgtccggctgtccccagggtcccacgcgtctgaggctgccgtcaacaaacagctgaatgacaaggaaagggtggcggcggcgctggagaaccccgccctgatacagacggttgacaggtgcctgaccgggcctgaggggtgaccaccaccaccacctggtggcgatgcaccgaaacacgtaaatgattcaacaaccgagtattttgggttgattaccgcgccaccaccaagtgggggtgaacgggacgagggcttatagcggtggagttgggttaggcagcaacagatggcgagtgggtagagcagtggcatttgacgcagccagtagttgggtanggtgtacaccggcaagcttctgcaagggtcatggcttttctgcagcagcggcagcgctgttcaacgtcagcgcatg

SEQ ID NO: 152 - DNA, 367 bp, Chlorella vulgaris
  unsure (1)..(367): unsure at all n locations
cccacgcgtccgcccacgcgtccgcttacttggttaggtttctgatcctttcagcggaccaggccttaaggtgcttctgttcctattcaggactggctgcttggtcgcctaggttactttctcgtcagctttgcaggcctcgtattcttcaaacatcagtgccaggcaaccgtccgtctctcccagaagacaacagcttgagagcgatggcattaatcgaccaacagtgtgccaatcgtgtggcaacaggagcagcagtgggtggtgcgctaggtgcctctataggtgcactgtatggaacatatgaagcctttagatacaaggtgcctgngattcttaagatccgatacattggccagnacacact

SEQ ID NO: 153 - DNA, 409 bp, Chlorella vulgaris
gtcgaggttacaaaaagtcaagggttggtctcccacctggttggcaaacctctgccacggggaagtgtaagtgtttgactgtgtgacttccccccttgctgcgtgcgtgggtattgagagcaagtagtgtcggatattattgctgtccagcagcggtgtactgcattttagctgcgctcttctctatgcccttcatgtcattctgccagtacacgtacccgttgtcacaacacagcatgatgcggaagggcaggctcatgcccacttgaagcttatgcaccacttgacattcttgcgctcaactattctcggctctttttggttgcaacatgtacaagcagtgcaaccatgaaagcttttctgggagctggagagcttagaaagggagttttgctgcccagtgctcaag

SEQ ID NO: 154 - DNA, 392 bp, Chlorella vulgaris
cccacgcgtccgcccacgcgtccgcccacgcgtccgggacgtgcggcagcagcgacgatggtgctgtcgtgcgacatcgatctcctgcatcctccccaggagctggagaagcggaagcacaagctcaagcgccttgtagcttctcccaactcctatttcatggacgtcaagtgccaggggtgcttcaccatcacgaccgtgttcagccactcccagacggtggtggtgtgccccagctgcaacaccgtgctgtgcgtgcccaccggcggcaaggcccgcctcacagagggctgctccttccgcaggaagggcgattagtcaggggaggcgctacgctggcatgtggtctcaagaaagtgcgccgccgccgcttgaggactcttgccagcggg

SEQ ID NO: 155 - DNA, 424 bp, Chlorella vulgaris
cccacgcgtccgcggacgcgtgggcggacgcgtgggctccctgcttgtgtgcgtagcctcagcagacatgcagacctccatgctgaagcctgcttccagccgggtggccttccagcaggccccccgccccgccagcgctgctcgccgcgtggtaacgtgcaatgcccagggcgtgagcgccttcaggaacttcgtggagaaggccgggaacgctgctgcagtgctggctgcgaccgccctggtggccggctccgccaacgccttgacctttgatcagctgcaaagcctgtcgtacaaggaggttaagggcaccggcgttgccaatacttgccctaccattgagggtggctctaccaaccccaaggagctgaaggctggcacctacaagctggcaaacttctgcatggagccgacaccatcaccg

SEQ ID NO: 156 - DNA, 435 bp, Chlorella vulgaris
cgagaaggcgatggatttggcccacgtgcgccactttgtggtggacgagtgcgacaagtgcctggagaacatcgacatgcgcgccgacgtccaggccatcttcaagaaaacgccgcacgacaagcaagtcatgatgttcagcgcgacgctctcccaggacatccgccccgtctgcaagaagtttatgagagaccccatggagatttatgtggacgacgaggccaagctgacgctgcacgggctggtgcagcactacgtgatgctgaatgaggaccagaagaaccgcaagctgaacgacctgctggacgccctggacttcaaccaggtggtaatctttgtcaagagcgtcgcgcgggcgcgcgagctaaaccggctgctgaacgagtgcaacttcccctccacaaccatccactcgtccatgccccaggaggcgcg

SEQ ID NO: 157 - DNA, 343 bp, Chlorella vulgaris
ctgaggcaacccctgctggcaagcagttgactaccgcctgagtgaagcgcactgtgtgatgcccgcgggattgcatgttggaggttgtagtgtacatgtgatgaagcctagctacacgtatcaatttccatagacttggctcgtgatggcactacctccgaacatatgtacagggtgctgttagctgtaagtggtgggtgcaaagcgatgttctaggcggctcattcagaaggctcctgggttgtggcattggtttgagcgtgtagctatatgtgtcatgaaccataggcggctgcgaggtgtcagtttcaggggcatggtgtatatgtaagagtagtgattg

SEQ ID NO: 158 - DNA, 388 bp, Chlorella vulgaris
cccacgcgtccgctcttgtgtaattcagcaccatgactgagggcaaggtccatctgtccatcgtgatttgcggccatgtggactccggcaagtccaccaccaccggccgcctgctgttcgagctgggcggtatccccgagcgtgagcttgagaagctgaaggaagaggcctctgcccttggcaagtcttccttcgcctttgccttctacatggacaggcagaaggaggagcgcgagcgtggtgtgaccattgcctgcaccaccaaggagttcttcaccgacaggtggcactacaccatcatcgacgccccgggccacagggatttcatcaagaacatgatctccggtgccgcccaggccgacgtgtgcctgctcatggtgcccgccga

SEQ ID NO: 159 - DNA, 378 bp, Chlorella vulgaris
cccacgcgtccggcaccacccaggcgctgcgcgccaaggtctccacccaggccactcgtggctccaaggtagcaacctccatgcgccgcaccgtcaagtccaagaacgtgaagaccaccgacaccagccagtggtacggtcccgaccgccccaagttcctgggccccttctccgagggtgctgtgccttcctacctgaacggcgagttcgctggtgactacggctgggacaccgccggcctgtccgccgaccccgagaccttcaagcgctaccgccagattgaggtcatccatgcccgctgggccatgcttggcgccctgggctgcatcttgcccgaggtcctgcagaggtacagcggcatcgagttcggcgaggctg

SEQ ID NO: 160 - DNA, 410 bp, Chlorella vulgaris
tgacggcccgtccgcccacgcatccgcggacgcgtggggttcgacagctctgctattgatttggggtagcaacttcttcaagcttggagcccagtagcctccaagttcacccttgcaacgtacgttaccctatcgcagcgaaagcttagtggcactgctgtcagctgcagtgcgacaatagccaaatgttgagtgtcacccctgctgtgggtctctactcgtcaaagcagcattggatcaggggttgcgcatttgggtgaagcgcgttgccagatatacctgacgctactctgcaagcctcgcatgtgcatggaccaggcccgggactcgcacagtgttgcacttgttaaaagttgacaggttaagaaaaggaggccaaagtttcacaaggtagacaaaaaaaagggggg

SEQ ID NO: 161 - DNA, 383 bp, Chlorella vulgaris
ggtcgagcccgcgtccgagcaaatccttttcccacgaacaaaggtcatagggtggcttattctgcatttgtagctagcctatgcagaacttcagcgttcatcgggccggtatcatgttattgcgcaccctctatcagccaacagtaagggcaggcggtactggtgaactccaagctggtcatctacggaggcacgcttggtgtcctgccggaaggctacaaaccgtaaggctgcctgccaagcagcgcactgtgtctgtgagggcgtcaaaggatgacgcggcggagaaagcagacgccagcaagcggataaaggaggttcaggaaaacctcaaacagttgggcattgatcgttccactgcccgacgcgtgctgcaaatctgg

SEQ ID NO: 162 - DNA, 392 bp, Chlorella vulgaris
  unsure (1)..(392): unsure at all n locations
ggcatctggggcgccatgaaggcatttggtggcaagaaggaggagcctaagacggttgttttgactccctgatgcctgcattgggtaaaggtgccaggcaaggcgaacagagcggaggtaggggcatactggagtaaatgggtatgcagttatggtctgtgcattgcactggggccagtgagggtgctgaggcctgctgctgctgccgctgccaaggcatgggggctggctagctgcaatggagcccacggcttccactctgtacgtgtgttagcaagggtggcaggtantgcgaacaggactgatttcaaacccgttcgctatatgcttcgtanccagtgcttccataatgggtagtggaaacggagcctgataggctgaaagtctgcgca

SEQ ID NO: 163 - DNA, 282 bp, Chlorella vulgaris
cggacgcgtggggcgaagtttggcctgttggttccgtgctgggggcaggctcacttgaagtaggctagctgccctgagggcaggttgcgagcctgcctaggttgtgggctgtatgggtctcatgctcggatgcagacctcactggacggtggtatgtttttgccttgcaagtatatgctggtggagatggatgccaggtttgcaagtagtagcaagtgcaggtgtaagcatgtaacatcgagtcataaaaaaaataaaagtaaaaacaaaaaggagaagagt

SEQ ID NO: 164 - DNA, 393 bp, Chlorella vulgaris
  unsure (1)..(393): unsure at all n locations
acggacgcgtgggccatccccgagcccgagaccgccggcgctggcgccggcatggatgccatgggcggctactaagcagtgactaacccttggtggtcctggctgcggctatcaatgtgtcccgagttgtccgtgtgtggattccctgctgctatagcactgctgttaggtgacctgacaccacaatccgctgccctttctctatgtcagagctattgctccttgctggccgcgcttcctttgaaagtctttgggaagcccgctcttcagttaccgcctgtggggactgtcncctttaccctcctttccgtgggtgcttatgacgtaatttgcattatataactcagcctgagtttagtacaaagaggtacaccgtaagtagcataccgtaaa

SEQ ID NO: 165 - DNA, 335 bp, Chlorella vulgaris
agcccacgcgtccgacctgaggaagctagggagcctgcggaaggccaacccccataagaaggactggcagcagatgcacctgtacatgcagtcgcaggtggaggcggtgagccacgagaagcatggcggggcggaggggctggaagagcaccagcagcgcctgctggaccataagctgcaagagaggatcaagaagcgggagggccagaaaagaaaggaggaggtggaagctgagcagcgtgaccgcttcaagcgcaggatggaggaggaggaggcccggcgggtggtggcgcagcagcaggctttgcagcagcagattgccgcggcagtggtgg

SEQ ID NO: 166 - DNA, 383 bp, Chlorella vulgaris
gtgccagacctctgttgcccgggccttcgcccctaaggtggctgcccagaagcgccagcgcgctgttgccgcccaggcctatgttggcaactggctccccggcagcgaccgccccgcctacctggagaagctccctggtgcctacggctttgaccccctgggcctgggcactgagcccaagagcctggagcgctttgtggaggctgaggtgattaacggccgctgggccatgctgggcgttgccggcatgctcggcgtggaggccctgggctacggcgactggtacagcgcacccctctgggccgtgactggcggcaaggcgacctactttggcgcggagctgcccttccagttcgacctgggcaccctcttcgccattgaga

SEQ ID NO: 167 - DNA, 359 bp, Chlorella vulgaris
tccgtcgccaagaagagcggcagacaaaatggatacgcccgtgaagctggccatcgtgatgaaggtcatcggcaggactggcagccgtggtcaggtgacccaggtgcgcgtgaagttcctggatgaccagaaccgcctgatcatgcgcaacgtcaaggggcccgtgcgcgagggtgacatcctgaccctccttgagtctgagcgcgaggctcgtcgcctccggtaatgcgggaggagctgggggcgctggcgcaagatgtgacccctgcgcgcctggaacagcagtgtgtggatggcgtgcagcgtgtagcagcagcactggcagaggcgggctgggtgggcccctttgtgtgcagctg

SEQ ID NO: 168 - DNA, 366 bp, Chlorella vulgaris
cccacgcgtccggtttgcagcttgctttatgctgttgctggtgttacaaagcctgcattgtgtgtacttgaggccacagatcggcccgtggccctgcccgtgcctgcatccttttgctgagcagtttggcagcatttcgatgtgtacgcaccgcagtgctgtgggtaggggttgccagctgtgggccttgcgtgtacggtgctgccggcctgttctcagccacttggccacgttgctggcacatctcctcggtgcctgtcgagtgtgcatgggggcccaagctttgctgaagggttctccacagtgttgaaaaggggccacagcgatccatggctgttgcgttccctgtaaggatgggatggacac

SEQ ID NO: 169 - DNA, 386 bp, Chlorella vulgaris
cccacgcgtccgcccacgcgtccgtgggctggtagtggcttcgtatggaagcgaggacccggccctgggcgccccagttgagtacatcaacctgaagggaacaacatatgacaacccagccgtctgcaagtacaccggcaacaagttttactcggatgactggaagggcggcggcggccactgatgtgctgcgctgagggccaagagggctgtgtcctgagggccagctgtctggtggcgtatactgcaaccctgttgagcggctgagcaattgctgccaccagcaccttcagatgcatagctgctggccgcatcggacagtgcaaaggcaagcgattgggcttctgagttggcggttcatgcctggatttctcaggcacctcctc

SEQ ID NO: 170 - DNA, 402 bp, Chlorella vulgaris
cccacgcgtccgcggacgcgtgggggcgttttatatataaaaatgcctcccaaatttgatcccaactccattgtggaggtgtacgtgcgtgccaccggcggtgaggtcggtgccgcatcctccctcgcccccaagattggtcccctgggtctctcccccaagaaggttggtgaggacattgccaaggagacgtccaaggagtggaagggtctgcgcgtgaccgtcaagctgacggtgcagaaccggcaggccaaggtgaccgtcatcccctccgccgcggcgctggtcatcaaggcgctcaaggagccgcccagggacaggaagaaggagaagaacatcaagcacagcggcaacctgtcaatcgatgacgtgatcgagattgcgcgcatcatgcgcaaccgc

SEQ ID NO: 171 - DNA, 209 bp, Chlorella vulgaris
ggggttggacttctttctcaaactccaaaagactacgggaattcgccgccaaacagatacacacaaccccctgcggtttccgtcaaggaaaacggaacatccactccaacccagaaacccaacccgacagcggcccgaagcggccgcgacccgcaccccccctccccccaaaaaattcgtccaacccgcaacgggcttaccccccggct

SEQ ID NO: 172 - DNA, 311 bp, Chlorella vulgaris
cccacgcgtccggtgatgtgctggccggccgcgtggagcagggcattgtcaagcccggtgacgaggttatcttcctgcccacccacaccgccgccaacccctgcatcggcaaggtcttcaccgtggagatgcaccacaagcgcgtggacaaggccggacccggcgacaacgtcggcatgaacgtcaagggcctggacaagggcaacatgccccgcaccggtgacgtgatgatcctcaagtctgacggcaccctgaagcctgtgaaggacttcaccgcccagatccagaccctggacatccccggcgaggtc

SEQ ID NO: 173 - DNA, 413 bp, Chlorella vulgaris
acccacgcgtccgcccacgcgtccggtgaagaccaccgacaccagccagtggtacggtcccgaccgccccaagttcctgggccccttctccgagggtgctgtgccttcctacctgaacggcgagttcgctggtgactacggctgggacaccgccggcctgtccgccgaccccgagaccttcaagcgctaccgccagattgaggtcatccatgcccgctgggccatgcttggcgccctgggctgcatcttgcccgaggtcctgcagaggtacagcggcatcgagttcggcgaggctgtgtggttcaaggctggcgctcagatcttctctgacgacggcctgaactacctgggcaaccctgccctcatccacgcccagtccatcattgccaccctcatcacccaggtggtgctga

SEQ ID NO: 174 - DNA, 376 bp, Chlorella vulgaris
accaaggtcaacgcgctgctgcaggcccatttctcccgcacgcacctcaaccccgacctgggcgccgaccagaagaaggcagtcgtcaacgccacgcgcctcctgcaggctatggttgacgtgatcagtagtaatggctggctgaacccggccctggcggccatggagatgagtcagatggccagccaggcgctgtggcagaaggacagtgtgctgctgcagctgccgcacttcaccaaggagttggcggcgcagtgcggggccaagggtgtggagactgtgtttgacctcatggagatggaggacgacgaccggcgggagctgctgcagatgagtgaccagcagctggaggatgtggcgcggtggtgcaacagat

SEQ ID NO: 175 - DNA, 381 bp, Chlorella vulgaris
ggcatcaagaacgtgcccaaccgcctgcgcattgtgatccagcgcaagcgcaacgaggacgacgacgagaaggaggagatgttctccctggtcaccctggccgaggaccagagcagcaagggcaagggcgtggtggtcctggaggcataaacacacacacgcgcctcgcggggggagctgccgcagcagccagctggcaggttccgtgcctggggatcgcgctgggcctcgcgtgggccttgcctttcaaacggttggtgtgggcggcgtttctggcggcgtttagggtctcttgcagacccttggtcgttgtgcaggccccagatgtcgctgtatcgaacccagctggcggtgccctgttgcggtgcttctggctcactg

SEQ ID NO: 176 - DNA, 384 bp, Chlorella vulgaris
gccatccagctggtgctcaagaaggcgctggctcacgacggcctcgcacgcggcctgcacgaggcctgcagggccattgagcgcggccaggcgcagctgtgcatcctcgccgacgactgcaaccagcccgactacaagaagctgattgaggccctgtgcgccgagcagagcgtcaacctcattgccgtgcccgaccccaagaccctgggccagtgggcaggcctgtgcaagattgacagcgagggcgaggcgcgcaaggtggtcggctgctcgtgcgccgtggtcaccgactacggcgaggagactgaggggctggcggtgctgcaggagtacctgaagagccgctgagcgcatgctgtgctgggcatgctgtgcacccgccca

SEQ ID NO: 177 - DNA, 404 bp, Chlorella vulgaris
cccgtggtggtcaagtttgggctgaaccacataccacgctggtggagcagggcaaggcgcagctggtggtcatcgcgcacgacgtggaccccatcgagattgtggtctggctgcccgcgctgtgcaagaagatgggcgtgccctacgtcatcgtcaagggcaaggcccgcctgggcaccgtcgtgcacaagaagaccgccactgccctggcgctgacggctgtgaagaacgaggaccagcgcgagtttgccaagctggtggagagcgccaagtccatgtacaacgatgggccgcgcgtgaactggggcggtcacatcctgggcgtgaagagccaggccaagctgcgcaagagggagaaggcgctggccaaggagcttaacacacggccctgagcaactgggcag

SEQ ID NO: 178 - DNA, 418 bp, Chlorella vulgaris
ggcacacgtgtgctgagcacgcatatgttggtgttgacacacctgaagtaattctcactggcagtgttcaagtggtttctacccttagcgtctttgcttgggtaccccatccacaaccccggtgtgcaccttggttttgcaaccaccatcaagtgtggtggccagcgcaacgcagaatattctgtttttgatggtgtgttacatgcaagtggagtcgtgttttgaagcggtgtgtgatgcttgtgcgggtgggtttaggtgttgccactgtctgggcggtgaagttaatatgctttgtgtgccttgctgtgatattgagaagagcagcatcttcatgaaattcccaaagaacgacgccttaaaattcttggtggcactggtgcgtgttcctcgagtgtgctcttatgtacgtttcctg

SEQ ID NO: 179 - DNA, 382 bp, Chlorella vulgaris
cccacgcgtccgcgcaccaatgacgctgctggtgacggcaccaccaccgccactgtgctggcacgcgagatgatccactacgggctgcagaatgtgaccgctggggccaaccccatcgtgatcaagaagggcattgacaagacctgcgagttcctggtgggcaagctcaaggagcatgcgactccagtgaaggggtctggcgacatcaagaatgtggccgccatctcctccggcaacgacgacgccatcggccagatgatcgcggacgccctggacaaggttggcgccgacggcgtgctggccattgagtcctccaactccctggagaccacggtggacgtccaggagggcatggagattgaccgcggctacatcagccccc

SEQ ID NO: 180 - DNA, 415 bp, Chlorella vulgaris
cggacgcgtgggccctgggccctgccaccagggagggtgagctggtgtggggtgtgtgccacatcttcgcgtccttcaatgacacctttgtgcacgtgactgacctgtccggcaaggagaccctggtgcgcgtgactggcggcatgaaggtcaaggccgaccgtgacgagtcctccccctacgctgccatgcttgccgcccaggacgtggccgctcgctgcaaggagctgggtgtgaacgctctgcacatcaagctgcgcgccactggcggcaaccgcaccaagacccccggcccaggcgcccagtccgccctgcgtgcgctggcccgctctggcctcaagattggccgtatcgaggatgtgacccccatccccaccgactctacccgccgcaagggtggtcgccgcggtcgccg

SEQ ID NO: 181 - DNA, 334 bp, Chlorella vulgaris
ggatgcgagacatgggacagcagctggcgtacctccccaacatgatggcggagctgggcaagatcaacatctccgagcggcagatcatgcggcacgtgggcgagctgttccttcaaatgagcgctgtgaacctgctggggcgggtattggataccccggatgccatgactaatgctcctgaccacatctcgacgctctacaagtcggtgtacgagtacatggaggtgtatgagagggtgcacctcctcaacgacagatacgcggtgctgcaagagatgttggacatccttcgcgtccatgcccagaaagagaacgcatcctttctggagtccat

SEQ ID NO: 182 - DNA, 407 bp, Chlorella vulgaris
atcttatcagcaccatctcagcaccttacctccggttgaccgcagacatgacgctgaccgccttcgcttgcttcagctccagcttggccggcaaggctgcccaagcctgcaagcggcagcagacagcccggcgtgctgtgcgctgcaacgctcaggatgaacagaagtccttctttgagagcaatcgccgcgcggctgtgggctacacagacgaggatagtgcagggcagagtaacatctttgcagtagagcccaaggtttatgtgtcaggctcatctgcggataactccaacgctggcccccagactgtaaccgttgcggctgcgggcttcgtatttgctatggcggctattggtgctgggcttatcgtgatgaatcaaccacagggtgtggaagcagtggcgccc

SEQ ID NO: 183 - DNA, 376 bp, Chlorella vulgaris
aggccaccaaccccactgcgctcacctggttccaacaggcggagctgcagaacgggcgctgggccatgctgggtgttgccggcatgctgaccccggagctgggtgccaagctgggcggcttcaccggccccgccggcagggtgccatggtatgatgtgtccaactacgacttctgggcccccgcccccacactggaggccatctccttcttcctctttgccttcgtggagtgccgccgcctgcaggatattgccaagcccggcagcgtggacaaggcccccttcttcggccacgagctgaagggcgcaggcctgggctaccccggctttgaccccctgggctacatgaacaccacccccgagaagcagaacgagtg

SEQ ID NO: 184 - DNA, 366 bp, Chlorella vulgaris
gcgccgcaccgtcaagtccaagaacgtgaagaccaccgacaccagccagtggtacggtcccgaccgccccaagttcctgggccccttctccgagggtgctgtgccttcctacctgaacggcgagttcgctggtgactacggctgggacaccgccggcctgtccgccgaccccgagaccttcaagcgctaccgccagattgaggtcatccatgcccgctgggccatgcttggcgccctgggctgcatcttgcccgaggtcctgcagaggtacagcggcatcgagttcggcgaggctgtgtggttcaaggctggcgctcagatcttctctgacgacggcctgaactacctgggcaaccctgccctcat

SEQ ID NO: 185 - DNA, 366 bp, Chlorella vulgaris
agggaatcccccgtcgacaacaggtccaaggttcacaagatgcagaccctctctgcccgtttcggcgtccgcgcccctgtctcccggggcacccgccaggtgacccgcgcctccgtggagtggtacggccccgaccgcgccaagttcctggcccccttcaccaaccccccttcctacctgaagggtgagttcgctggcgactacggctgggacacctctggcctgtccgccgatcccgagaccttctcccgctacagggaggttgaggtgatccatgcccggtgggccatgcttggcgcccttggctgcgtcgtgcccgagctgctggaccgcaacggcaccgtcaactttggcgagaacgccgtg

SEQ ID NO: 186 - DNA, 187 bp, Chlorella vulgaris
cccacgcgtccgcttgatcagagcttgttgtaactccggttgtcatgcagagcgctgttgctgccgctgcccgaactggggtagtgatcgcggggcccaggacagtccccaagcgcagcttcgctacaaggagcttcggtggcttctttggcaacagctctgtggcaccagggacatccaagagagt

SEQ ID NO: 187 - DNA, 368 bp, Chlorella vulgaris
acccacgacgtccggacgcgtgggcggacgcgtgggctgcgcgtgaccgtcaagctgacggtgcagaaccggcaggccaaggtgaccgtcatcccctccgccgcggcgctggtcatcaaggcgctcaaggagccgcccagggacaggaagaaggagaagaacatcaagcacagcggcaacctgtcaatcgatgacgtgatcgagattgcgcgcatcatgcgcaaccgcagctgcgccgcctcgtttgccggcagcgtcaaggagatcctgggcacctgcgtcagcgtgggctgcaccgttgagcacgaggacccccgcgaaatccagtcaaagattgacgatggcgaggttgaggtgcccgaggagtg

SEQ ID NO: 188 - DNA, 424 bp, Chlorella vulgaris
ggtggcgctgtacgagcgttttgggtttgtggaggtgccacagtgtgacatccctgggcccctccaatttgagttccgagctgggactgttgttgcaaaagtggcagcgaacgaccggctggtggtgttgcggaggcaagctggggccaaggctgcctagtaagtcaagggtataacacgcccctagagggttgtggtgctcacccagcaggttgagcataagcctgtgcttctagagcagcgtaacaaaactcagttttggtaacagaagtgtcactccagcgccgggttgctcctttgcttatactacaaagtcgcaacctgcgcccaagctgcttgcaccttcacacctcatcttgcccaagcaggccctccgggaacctcctggctatgcactgtactttgtgtaatagctgtgggccac

SEQ ID NO: 189 - DNA, 125 bp, Chlorella vulgaris
acaggcatctggctggcgagggctgcgtgtagttagggaaggtagcttgctgccattcggttgccgagggttgtcagcagccctggacctctggtcacaacttcctgtaaggcttcaccggaccc

SEQ ID NO: 190 - DNA, 352 bp, Chlorella vulgaris
cccacgcgtccgcggacgcgtgggcggacgcgtgggtgagcattggtgatggtctgaggcccggctgcatccatgatgccaatgatgcggcccaattcgctgagcggaagagccagggggagctgaccaggagggcatggcacaaggatgtgcaggtcatgaatgatggcccaggccatgtccccctgcatctcatcccagagaacatggagaatcagctggagtggtgcaacgaggcccccttctacacgctgggcccgctggccacagacatcgcacctgcctacgaccatatcacctctgcaatcggtgcagccaccatctgggccgccggcacgggtctgctgtgcta

SEQ ID NO: 191 - DNA, 377 bp, Chlorella vulgaris
catccctgtactgcgtgggcctgcttgcttgggtgggcgggccatgtaagcgcttgcttgtgcaatagatttgtagtgtgtcacacctggcgtccgtgctgtaagagtataagttttggtgtcttgggttccttgtgcatgctgtcctttggttgatttcatgctcttcctatcgtgccggttgctcttgcacacacctctgctccatttcatgtgcttttccggcgattgtgtcgtgacaattttctcaggccatgcttgcattgctgtatctcaaagacgttgtgcttgccttgtagagtgctaatgctagccacaaggtgtgggttttcccccatttaggtatcccgttatttaatccgtggtcctggtgcaca

SEQ ID NO: 192 - DNA, 386 bp, Chlorella vulgaris
  unsure (1)..(386): unsure at all n locations
cccacgcgtccgcccacgcgtccgcccacgcgtccgccggtgggatgcttctggcgagggccccttgctcgggctgccgctttggcagcccggtccagggtttggaacgagccaggcctgcgcctttgcgggccagcgctgttgctgccatagccacgccccatccggacatctgtgaagtgctgctgaccagagaaaagatagcagagagagtgacagaagttggtaaagagctggctgtcgaatatgcggacaagcggccactagtcatagggacgctgaagggcgccatcgtattcatgagcgaccttgtgcgggccatcgagccggtcccagagggtcttcagctagagttcctgcgtgcangttcctatgggaacagcaca

SEQ ID NO: 193 - DNA, 124 bp, Chlorella vulgaris
acggacacctgggtgaaaacaagcacgatggccaaaatcaaagcccatgaacttccgaacaagaaccaaggccaatttccgggccaacctaaaggacctaaaccagaacctggttccccgcctt

SEQ ID NO: 194 - DNA, 364 bp, Chlorella vulgaris
atcttttattgcccttgtcgaaacctaagccaccatggttgacgagaagaaggtcaaggccgcaatcaaggagggtggcaagaagggcgtggacctatgcggtacctgcgacatgggcggcgtgtccttcttcaaccttgccatcgagtctgccgatggcgagtttgagctcctggacaaggtgctggagggagccaacgcccctgttgacgaggccgctgaggagcgcaagggcggcgccgctaacatcggcaagttcttcttctctgctggtgaccaccagctggctgccctgtgccacctgcccaaggccctggctgagtccaagagcgtgaagaagcaggactgggtggatgccgtgctc

SEQ ID NO: 195 - DNA, 387 bp, Chlorella vulgaris
ctcccgcacgctcactgcgatggggctgtaccatgtcacccaggctgccgtggaggacggcctggtgcatgtggacattgccctgccagacttcaagatcgcgttcttcctggagggcgctgtgaaggcggcgggggcagcaggcgcagcgcgtgcgggccaggaggacgggctcctgtccgccctagatgctgaaggggtggtgctgagcgggtatgtagcaaacgagacgcccggcagcaaggcggccaagctgcgcctgctggagcaactgggctggaaggttttcaccgtcacctgggtcgaaagcaccaaggacgaccgggccaaacgtgctgcactgctggcgctgctggaccgcgctgggcgcgacgccctgatgccggg

SEQ ID NO: 196 - DNA, 375 bp, Chlorella vulgaris
cccacgcgtccggcccgaccccacactctgctggccataggctgctggccatagcggcacgttgatcacgcgagagggctctgattggcggctgctgcactagggtggacgccagctgagccccatgggcaagattttcgacgaaccccagttccctgttgtcgacaaagcccccagcttttggagaacagtgggtaacttcaacgtttcagactggggcgttgtggcagcagtgacgggtgttagcatccctgttggatacgcagcaggcgcccagccgtcaccagccttcaccaggctctccggcaacatggccaagccctcaatggtcgcggctgggttgatgggcgtgacccttggtttcatgcttgcata

SEQ ID NO: 197 - DNA, 395 bp, Chlorella vulgaris
gatccggcaaggaagcaagatgccgatccagggcgggcacaagtaccaccagtatcaggtggtgggacgccaccttcccacggagagggagccggagcctaccgtgtaccgcatgaagctctgggccagcgaccctgtcagggccaagagcaagttctggtacttcctgaggaagctgcgccgggtcaagaaggccaatggccagatcctggcatgcaacgagatctttgagaagcaccctaccacggtgaagaactacggcatctgggtgcggtaccagtcgcggactgggtaccacaatgcgtacaaggagtaccgcgacaccaccctcaacggcgccgtgtcgcagctgtatcaggagatggcctcccgccaccgggtgcgccaccagtcga

SEQ ID NO: 198 - DNA, 357 bp, Chlorella vulgaris
acggaggcctctctgggacgggttgagctgtggcaagcatgttcacggctcgcaaaaagattgtgaaggagcggggtgtggagcccgatgagctcgaggagcaggtcgctcaggcgctctttgacctggaggccaccaatgccgagctgaagggcgacctgcgcgacctgtacattgccgctgcgcgcgaggtggacgtctccgcctctcgcaaggccatcctcatccacgtgccctaccgcctgctcaagaacttccacaagattcagcagcgcctggtgcgcgagctggagaagaagttctccggcaaggacgttgtgattgtgggcgtgcgccgcatcctgccaccccccaagc

SEQ ID NO: 199 - DNA, 386 bp, Chlorella vulgaris
aggccatcctgaaaacaagcacgatggccaaaatcaaggcccatgagctgcggaccaagagcaaggccgacttgctggcccagctgaaggaccttaagcaggagctgggtgcgctgcgtgtcgccaaggtcactggcggtgcccccaacaagctctccaagatcaaggtggtgcggaagtccatcgcccgcgtgttgaccgtggtcaaccagaccacccgcagcaagctcagggaggaggttgccggcaagaagtacgtgcccctggacctgcgcgtgaagaagacccgcgccatgcgcagggcgcttaccaagcatgagaggaccgtccggactgagaagcagaagaagaaggacgcagccttcccccgccggaagttcgctgtc

SEQ ID NO: 200 - DNA, 313 bp, Chlorella vulgaris
acccacgcgtccgcccacgcgtccgcccacgcgtccggccttcttgagtcgctgattctatgccatgagtccagctgccaactgctccctttctggtccatgacgccttttccggccgttcgagaaaagtataatactctttggggccgtagagtatcacttgaaggactgtgcacagatggcagggcagcccgaggcgagggaggttgaagaacactacatcctcagggtgaaggaccagcaacttgcagagcagatacgggccgtgctccgaggagagagtgggcctggctctgatggcacccaagccgag

SEQ ID NO: 201 - DNA, 394 bp, Chlorella vulgaris
gcgtcctagcggccatagtcagttgttgcctctggaagaagggggaccatgaccaccaagcgcaggaaccatggaaggaacaagccagcgggcgcccgtggcaaggtgaagcgtgtgcgctgcgagagttccgccgccatggtccccaaggacaaggcagtgaagcgctttgtggtgcgcaacatcgtggatgcctctgcactgcgcgacatccaggatgcacaggtgtacaacgagtacatgctgcccaagatatacaggaaggtgtactacagtatctccgccgccatccactcccgcatcgtgcgcgtgcgctcccgcaagaaccgccgcaaccgcgagccgcccaagttcgtgcgcgggggaggcgtcggcgccgcacgtggcggctacc

SEQ ID NO: 202 - DNA, 304 bp, Chlorella vulgaris
acccacgcgtccgcccacgcgtccgaaaaaaaaaaaaaaaaaaaaaaaaaaaaaaaaaaaaaaaaaaataaataaaaaaaaaaaaaaaaaaataaaaaaaaaaataaatgaactgaaataaaaataaaattaaagagggtggccctttctaatggttccatgtttatttttgtttgcatgtaaattcttcttttttttattgtgtctctttatttcatttgactggctttttttttaaaattttttgatgggaaataccttgtctttaccctttttcatctctttcaactcaatctttttttgg

SEQ ID NO: 203 - DNA, 275 bp, Chlorella vulgaris
gcagtacttcctgggcctggagcacgtgttcaagggctccggcaacccctcgtaccccggcggccagttcttcaacctgttcaacctgggcaagaccgaggccgagctgttcaagcttaagaccaacgagatcaggaacggccgcctggccatgcttgccatgctgggctatggcgcccagggcgtgctgaccggcgccggccccttcgcctgcctgcaggcacacctggctgaacccgtccacaacaacctgctcacaaacttcgcccgcgtgt

SEQ ID NO: 204 - DNA, 399 bp, Chlorella vulgaris
cggacgcgtgggcggacgcgtgggcgcgaggcgcgcctgcccaccaagatcctctggatccgccgcatgcgcgtgctgcgccgcctgctcaagaagtacagggatggcaagaagatcgacaagcacctgtaccacgagctttacatgaaggtgaagggtaatgtgtacaagaacaagcgtgtgctcatggaggccatccacaagcagaaggcagagaagattcgcgagaaggcgattgtggaccagctggaggcgcgccgcgccaagaacaagcaggcacgcgcccgcaaggccgcccgcagggaggagcgcttcgcaacaggggcagatcggcactgccgccaccgagtccaagaagtaaatgagccacccttggtgttggctgactgccggctggct

SEQ ID NO: 205 - DNA, 324 bp, Chlorella vulgaris
  unsure (1)..(324): unsure at all n locations
gcacgcgtccacccacacgtccgcccacgcgtccgcccacgcgtccggccgtgtccatgcgcaagcacttggaggccaaccgcaaggacaaggacgccaagttccacctgattctggtggagtcgcgcatccaccgcctggtccgctactacaagaagaccaagaagctgccgcccaactggaaatacgagtccgccaccgcctccgccctggtcgcataaactgtgttcaaagcagctgcggctggctggatgatgccggcactgctggagccaggcaantgggctgacggtattgagtgggaatttgcctttacnttgcaac

SEQ ID NO: 206 - DNA, 388 bp, Chlorella vulgaris
cgagatctttgagaagcaccctaccacggtgaagaactacggcatctgggtgcggtaccagtcgcggactgggtaccacaatgcgtacaaggagtaccgcgacaccaccctcaacggcgccgtgtcgcagctgtatcaggagatggcctcccgccaccgggtgcgccaccagtcgatccagatcatcaagtttgcgaccatgaagcccgcccagtgcaagcgccccaacaccctgcagttccatgactccaacatcaagttcccgctcacccgcaagatggccaggccctccgaccccacccacaagtctgtgtttaaggcggtgcgccccaacgttgccatctggtaacctcttacttacccttagtagccgcgtagtccccgtcgc

SEQ ID NO: 207 - DNA, 402 bp, Chlorella vulgaris
gtggaatcccccgtcgacaacaggtccaaggttcacaagatgcagaccctctctgcccgtttcggcgtccgcgcccctgtctcccggggcacccgccaggtgacccgcgcctccgtggagtggtacggccccgaccgcgccaagttcctgggccccttcaccaaccccccttcctacctgaagggtgagttcgctggcgactacggctgggacacctctggcctgtccgccgatcccgagaccttctcccgctacagggaggttgaggtgatccatgcccggtgggccatgcttggcgcccttggctgcgtcgtgcccgagctgctggaccgcaacggcaccgtcaactttggcgagaacgccgtgtggttcaaggccggtgccgccatcttcggcgatgac

SEQ ID NO: 208 - DNA, 392 bp, Chlorella vulgaris
gtgctgtgttcccaagggttgcgtggaggcgtgctgcccctggcccctggattgtatacgagtcatagctgatgatatgaggttgcgctgctgcgcatgcgttcaggcttaggggttttacgaagtggcatagcttgctttgttcctggcttgagtgacggggcatttgatgcaccatacctgctgtggtgtcgtgtgtgtgcgtccccagtgtgtcgtgtctggcggtaagaacctgttgttgtcagcgggatgccataatgcttcaaacaaattgtgcaggtgctagtgtgcagcctgtggttttttgaggtgtgtagacttgtcctaatgggtgtgatcatgggtttatatgagcatgcctcgtgcagactagttttcccatccatttc

SEQ ID NO: 209 - DNA, 427 bp, Chlorella vulgaris
caccatgagggggccactacctatggcaaaactgtgcggtggggcgcgggtgtggttctgtatgcggttgctgtgagttttagcatggacaagcaccagcaaggtaccatagggggtatcaagttctatgcgtcatgatattgcagaggggttcaggtagtttttcagtgggtggttgcagaatgcgagttgctcgcctgtcgggccttgattttggcatgcttgcttaaaatccaggaggtgccctatggtcgaggccctccccttcctggctccagtagtgaagcctggtttgacgcaccatttgccatgctcgctttgcgataaatgctacaccatgttgtgaggtgctgcagcgtctatttacaacatctcttggggtgtcaggcgcccagtctctacatagtatcccaccaatgctgaaggg

SEQ ID NO: 210 - DNA, 273 bp, Chlorella vulgaris
cccacgcgtccggccggccttcatgtatgtcatcaaagagggcgagtggtgcgggatgctcatcctgcctacctggaaggatcatgggctgcaagccagcgtggaaggccatttactttttgcttgaagctgagtgtacactatgcacctggtgtcgtttgcttgtctttccgtcttgaggtgggactcaattttttcggggtcacccttggcggggctcagtcgcagtgtagtagtgatgcgtgcaggaccgctgtatgtggtttgtcttga

SEQ ID NO: 211 - DNA, 351 bp, Chlorella vulgaris
  unsure (1)..(351): unsure at all n locations
ggcaagatggcgcggggcccaaagaaacatctgaagagattgaatgccccgaagcactggatgctcgacaagcttgggggcatctttgcccccaagccgagcgcgggcccccacaagacccgggagtgcttgccgctcatcctgctgctgaggaacaggctcaagtacgctctgacgggcaaggaggtgacgagcatcctcatgcagcgcctggtagaggttgaccgcaaggtgcgcactgacaagacctaccccgtgggcttcatggacgtggtcaccatccccaaagaccgacgagcacttccgcctggtctacgactgcaaaggccgctttgtggtgcancgcatcag

SEQ ID NO: 212 - DNA, 419 bp, Chlorella vulgaris
ctcagcagacatgcagacctccatgctgaagcctgcttccagccgggtggccttccagcaggccccccgccccgccagcgctgctcgccgcgtggtaacgtgcaatgcccagggcgtgagcgccttcaggaacttcgtggagaaggccgggaacgctgctgcagtgctggctgcgaccgccctggtggccggctccgccaacgccttgacctttgatcagctgcaaagcctgtcgtacaaggaggttaagggcaccggcgttgccaatacttgccctaccattgagggtggctctaccaaccccaaggagctgaaggctggcacctacaagctggcaaacttctgcatggagccgaccaccatcaccgtcaaggaggagtcgcagttcaagggcggcgagactgacttcgttgccacca

SEQ ID NO: 213 - DNA, 403 bp, Chlorella vulgaris
agcagcggcacacaccctgctgtcccccctgccgctgctcctgcactaccgctgtactgctgctgccaaagaggggggggggagggatctcaataccccctaccgctggtcggttgtggtgactaggaggggtgcttctgcatccgaaccctctaccgtcggttgacacgggctctgagggggctgcctgcctgtcactcccggggcagccgctggtgcacggtcttagccacctcaaagaagtgccgcacatggtcctcaggcgtgccctgcatgacgccatggcccaggttcatgacatgccgcacgcccgcagccttggctttctgcaccgtgtcgatcacgcgcgcctcgatggtctcgtggctgccaaacagcacgcccgggtccatgttgccctggt

SEQ ID NO: 214 - DNA, 407 bp, Chlorella vulgaris
gggcgccgccagcctgagcgcctaccccgacaacgagtttgtcgcgctgctggagctgctgagcgagagcggcaggatactcacgccggtgcaaaaggcgaggatggcctcctggagcttccccttcttcccagacgtcctgcaaatcatgcaggccatcacccgcctgccgccacctgcaggcagtgcgcctgacgtggcggacagtgggaccttgcaggtccctccttccacatgcccatgacaacccctgcccctgggcacgcaatgtattcgaaaccgaagttgcccaggcgctgctgcgggctggggggctcgccccttgtggggcgagattattgcttgcaagtacaccgactctatcatttcaaaccttttggtaaatgcaatgactggccggctggtgc

SEQ ID NO: 215 - DNA, 332 bp, Chlorella vulgaris
agcctgatcaatgccaagagcattgtggccaccctcattgtccaggttgtgctcatgtcctttgtggagggctaccgcatcaacggcggccccgcgggcactggcctggacgccgtgtaccccggcgaatcctttgaccccctgggcctggctgacgaccccgacaacttcgccgagctgcgggtgaaggagatcaagaacggccgcctggccatggtctccatgctaggcttctccgtgcaggccattgttaccggcaagggccccaccgaaaacctgaacgacaacctgtccaaccccggcaacaacctgtgggctctgtccgcaaccct

SEQ ID NO: 216 - DNA, 430 bp, Chlorella vulgaris
gggccgagcacgcgtccgggaaaacccattcccagcactggtcggacttgggccctgcagccaatcttggctaggcagcctccatgttttaggtacccagtcaccgaccacgttgcttttgatccaataccacgcagacggccccttctgcagagggacaggttcaggttgcgagcggaaaagcagtcttctaggggcacagaagacagtctgctggatgaagcggcggatccagccaggagtcctgtaacccagggacatgcgcaagaacccccaacacaggaggaagggagggaaagccgagacctcttcatccctgtcatggttggaatagcacttgccggctactgtgccaccgccctcatagcatatgtagagtacaactttgacttctgaggttgaggatcatagtaagcatgcacacgggaag

SEQ ID NO: 217 - DNA, 361 bp, Chlorella vulgaris
gagttcgtttcaaccttgtaatatcacacaggggcaactatggcggctgaggcagggaagcgacaaccaagcgcgcagatgacacagttcctggtccaggaacaagccaaggcgcagttgcagcaaacggtggcaagggtaacagatgaatgcctcgataagtgtgtgggcaacccacggaactacttgagctcgcgggagcaggcatgccttgacaactgctcacggggcttcctggagaccacacaattcctggtgaaataccttcagtccaaggcaggcggcgggcgaaacagtgacttccactgaagaaggctacaagctgctgggctgccacagacgagtttgccaccaacagcca

SEQ ID NO: 218 - DNA, 356 bp, Chlorella vulgaris
ggaagggggagagccgcaaaaatggcgtcggacaagaaggctcagaaccccatgcgcgagatccgcgtcgcaaagctcatcctcaactgctgcaccggcgagtctggtgatcgcctgcagaaggcggcaaaggtgcttgagcagctgaccgggcagcagcctgtgtttggcaaggcccgctacaccgttcgccagtgggccatccgccgtaacgagaagatctcctgccacgtcaccgtgcgcggggagaaggccgtgcagctgctggaggccgggctcaaggttcgggagtacgagctgcttcgtcgcaacttctctgacagcggcaactttggctttggcatcaatgagcacat

SEQ ID NO: 219 - DNA, 259 bp, Chlorella vulgaris
cccacacgtcaagccaagcttccggcgcacatgtatagcatacatgggacgatacgcaggtctgcactcatgcatgttactgcacacatagattgcaacattgtctggcaacgtttcgttcgatcaaatggtaggttatagggtatgatatcttgtctggctggttaacttcccagttcactgtacatgcaacatcaccacccatctacctgaacaaaagcctgctccatggaagtaccttattgaatccggcattgtg

SEQ ID NO: 220 - DNA, 397 bp, Chlorella vulgaris
cttttgttgtctctagagctccagggcttgcccaggcagccccgcacaggtcaaggggagcaatactgggaaggcagccttcgtgagactacgggagttctgcatcatgaacaaaatcttatttgccgatcaggctggcaagcaggccatatccacgtactcccggtcgcattatgctatggcagggctgctgcccctgggactgatctctcccaccaatagcgctccggccaaacttgctgaccttgggctggcggtagcgctcccagtacacagccacattgccttgacctacgtcgttgctgactacgtgcctcggggccttcaagtgccggttagggcaggcatcctgggcatgtctgttctcacatgcctggggctaaccaagctaaccctc

SEQ ID NO: 221 - DNA, 411 bp, Chlorella vulgaris
acggaaacgctcgccccttctcggaagcaggtcaccaccatgcagaccgccaccatgcagaactccttcgtgggcaccagcgtgaaggcccaggccccccgtgcccgcgagggcatgagcaccgtggtggtggcttcctccggcaagaaaattgacctgaacaagcagggcatcaactctgtcgagaaccccattgtcaagctgaacctgcgcggcgagagcatgagcatgcagagcaaggactgggtggacccccagggccgcatgggcaagggctttggcgtctaccggtttgccaacaagtatggtgccaacgtggatgggtactcccccatctacacccctgacacctgatccgagtctggtgacagctacaagcttggcatcaagggcctcattgcctgggctggc

SEQ ID NO: 222 - DNA, 406 bp, Chlorella vulgaris
agccaacgcgtccgcggacgcgtgggtgccgatccccaaaccttcgctgcctaccgcgaggttgaggtcatccatgcccgctgggccatgcttggcgccctgggctgcctgacccccgagctgctgcagaacgccggcgtggccagcttcggcgacgctgctgtgtggttcaaggctggtgcctccatcttcggcgatgatggcctgaactacctgggcaacccctccctggtccatgcccagtccatcgtggccaccctggccgtgcaggtcatcctcatggctcaggctgaggctttccgtgtgagcggcactgccccctggagcggcgaggagctcgacaccctgtaccccggtgatgcctttgacccccttggcctggctgacgaccccgacacctttgctg

SEQ ID NO: 223 - DNA, 407 bp, Chlorella vulgaris
aggtagcgaacttttctgagcacctgcccctgtgaaccgcgttaggtcgattgcgtcatgagttcagctaaacagctggtggatgagacgatcaagggcaaccgtgtggtggtgtggtcaaagagttactgcccctactgccacaaggccaagcgtgcactgaaacgctacttaaaggatagccaagtcgtggtggttgagcttgatgagcgtaatgatggcagccagatccagcaggcgctgggccagataactggtggcacctctgtaccccgggtcttcattgacggcgagttcatcggaggaggggatgataccgagaggttggcaaacaatggcaagctagaagtgctgctgaaggacaagggcatcctttgaagccagcaacgctaacatccgtgtgtctg

SEQ ID NO: 224 - DNA, 144 bp, Chlorella vulgaris
gcgcaggggtcccctgggaacgggtctggagcgcagcagccggggcatctgcgctgaggttgtaaccgttggcctgtggcctggtaggtgcagattagtgctgcttggcagcatggtcactgctggtgctgtctttgcaatgca

SEQ ID NO: 225 - DNA, 371 bp, Chlorella vulgaris
agccaacgcgtccgcccacgcgtccggtacgacacaccttttactgctgtttgtagaagcatttggagtcttagctgctcatgctcgtaagttttggccatgccagtggcgcagagttcctatatcgatacaggaactctgctagatatccctagcctacagatagtggggctagtaggaagtgagtggtagttgggaagcggtggttgtgtcacaagtgatgtgtgtttattgatatttttggcacttgtcatgctgacttgtgcttcatggcgtgccaatggggttcctgactcaaaaactcggagtcaccactcccatcgacttcttgtacactgaattgacctttggagatatacccccctgcaatg

SEQ ID NO: 226 - DNA, 376 bp, Chlorella vulgaris
agggacaagtctcgctccgccgaggtggtgacccgcgagtagaccattaacctgcacaagaggctgcatggcataaccttcaataagagggctcctaaggccatcaaggagattaagaactttgcccagcaacaaatgaagaccatcgacgtgcgcgtggacgtcaagctgaacaaggccgtgtggagccagggcatcaagaacgtgcccaaccgcctgcgcattgtgatccagcgcaagcgcaacgaggacgacgacgagaacgaggagatgttctccctgatcaccctggccgaggaccagagcagcaagggcaagggcgtggtggtcctggaggcataaacacacacacgcgcctcgcggagggagctgccgc

SEQ ID NO: 227 - DNA, 408 bp, Chlorella vulgaris
acgagccccttcagcaaaagatccacgatgcagaccgcctttgtccgctccggcctccgtgccgccgtccccaccgctggcaagggcacccgccaggtgactcgcgccgtctgtggagtggtacggccctgaccgcgccaagttcctgggtcccttcaccaaccccccctcttacctgaagggtgagttcgctggcgactacggctgggacacctctggcctgtccgctgatcccgagaccttctcccgctacagggaggttgaggtgatccatgcccggtgggccatgcttggcgccctgggctgcgtcctgcccgagctgctggaccgcaacggcaccgtcaactttggcgagaacgccgtgtggttcaaggctggttccgccatctttggtgatgaccggctcaa

SEQ ID NO: 228 - DNA, 315 bp, Chlorella vulgaris
gatacctacttggacctactgcaggcagagtactctgaaggggatgctctggacgctctcggtctgacccgctactgctgccggaggatgctcatgacgcacgtggacccgattgagaagctcctgaattacaacacgttggagcgtgcaccgcctcagcaacagcaccagtgaggaccaggcagcagcctttgcagccacccaccgccagagccgccgctcggggtggttgtctttgcagtcttgctgacactatgacacctcaggcactgttctgtgctctagaatttcacagattacacagggtgtcctctt

SEQ ID NO: 229 - DNA, 409 bp, Chlorella vulgaris
gtggaatcccccgtcgacaacaggtccaaggttcacaagatgcagaccctctctgcccgtttcggcgtccgcgcccctgtctcccggggcacccgccaggtgacccgcgcctccgtggagtggtacggccccgaccgcgccaagttcctgggccccttcaccaaccccccttcctacctgaagggtgagttcgctggcgactacggctgggacacctctggcctgtccgccgatcccgagaccttctcccgctacagggaggttgaggtgatccatgcccggtgggccatgcttggcgcccttggctgcgtcgtgcccgagctgctggaccgcaacggcaccgtcaactttggcgagaacgccgtgtggttcaaggccggtgcccccatcttcggcgatgacgggctga

SEQ ID NO: 230 - DNA, 394 bp, Chlorella vulgaris
cgtgtcgcagctgtatcaggagatggcctcccgccaccgggtgcgccaccagtcgatccagatcatcaagtttgcgaccatgaagcccgcccagtgcaagcgccccaacaccctgcagttccatgactccaacatcaagttcccgctcacccgcaagatggccaggccctccgaccccacccacaagtctgtgtttaaggcggtgcgccccaacgttgccatctggtaacctcttactaccccttagtagccgcgtagtccccgtcgcggcagtagcctgggtctggcagcagcactgctgcggcagggggcagcggcgtcagctgcctgggggcggtggtgcgtgtgcggtaaagagaggagccggcgataggcaaaatggcttgccaaccag

SEQ ID NO: 231 - DNA, 391 bp, Chlorella vulgaris
gtgggacagcagggtttgatgttgccccgacggcatgctgcaaggcattggaaggccttcaatttgattcaatgatttgtaggtacgaattttgtggctgaagaggtgggggtgtgaagagtcctgccgtagcatctggactggtgtggcagcggggcatgcatgggggctctcataagcgcccaactttgttagctgtaagggatgatgctaagcagtggttggtttcgggtgcagcaaggagattgtgcgaatgacccttgacacagctggcacccgctacactgctgtctgaccccctcctgtcaggtgcatttccgtagtaattggccctgaaagcacaacccttggagagtggggaagcacctttggggcttgcccccaggcatcc

SEQ ID NO: 232 - DNA, 114 bp, Chlorella vulgaris
ctcgacccacgacgtccgcccacgcgtccgcccacgcgtccgcccacgcgtccgcccacgcgtccgcggacgcgtggggtctacgcggacgagacgtacagcttacggtttacg

SEQ ID NO: 233 - DNA, 373 bp, Chlorella vulgaris
gctgttcaagggccagctggacctcctggagaaggcgcctgggggcatcaaggtcaacagccgcctgcagacaagcgaccctgatgtgtacgctgtgggtgatgtggcggccttccccctcaagctgaccggcgccgtgacccggcaggagcatgtcaccaacagcaggctgaccggcgcatacgctgtgggcgagctgctggcccctggcacccagcccgagtacgactaccttcccttcttctactcccgggtcttctccctctcctggcagttctacgggctgggcgagggtgaggtggtgctgtacggggaccgagccaacgggtccaagtttggggcctactgggtgaaggagggccaggtggtgggg

SEQ ID NO: 234 - DNA, 391 bp, Chlorella vulgaris
cccacgcgtccgagctcctgcagccttgctggcttgaacccctttcccaagtaccagcactagcatcatgcagacagccctccgctccaccctcttcagcgcccgccctgcgcaggtgcgccgctctgtggcagtgaatgccaagagccccggcacccccgcttgggcacctgagcggcccctttggctgcccggtaccactccccctgcccacctcgatggcaccctggttggtgactttggctttgaccccctgaacctgggcgcgaaccccaaggcccttgagcggtatgtgcaggctgagctgcagaatggccgctgggccatgcttggcgtggcaggcatgatcttccccgagctgctcaaccgcgccggcatcttcactgcccca

SEQ ID NO: 235 - DNA, 258 bp, Chlorella vulgaris
aggaccatgtacggcatcttcatcgaggcacttgtgaccggctaatctcccctggataacctaacgtaccacctgactgatcccacctccaacagcggcttctccaggctgactaccaccaagttgacccctgaattcatccctgaattttgagggaaatcccctggctgctgctagttcctcattgttctacctcttggttggttgcaggtgtgtcactgttgtgtgtacgggacatgcgtgaccccttgagtgtcg

SEQ ID NO: 236 - DNA, 404 bp, Chlorella vulgaris
agcggacgcgtgggtcctgtttaggccataaaggtggtggaaggagcccgggcggcgcttacatcacgagtcatggcgctctcactcaccgcacagatggccaacttgagagtcagtgccaaggcaccgacactcaagcggttcgagggcttcaaggctgcagcagctttcaagaacgcacccacagccaaggcagtgcaggttgcattccgcaaggcgcctctccgtattgagtgcgcccgtgtgggtggtgtggagattcccaaccagaagtttgtggagttctcgctccagtacatctacggcattggtcacaccactgccaaggctattgttgcctccacgggcattgagaacaagcgggtgaaggagttgtctgaggaggagctgactacgcttcgtga

SEQ ID NO: 237 - DNA, 396 bp, Chlorella vulgaris
cccacgcgtccggtggagaccctgcccatcagcagccatgggtatctcccgcgactcgcttcataagcgccgggcgacgggaggcaagcagaaggcttggcgtaagaagaggaagtatgagctcggccgccagcccgccatgaccaagctgtcctccaacgtgacagtgaggcgtgtgcgcgtgcgcggaggcaactctaagttcagggcgctgcgcctcgactcgggcaacttctcctggggctccgaggccgtgacccgcaagacccgtatcctggatgtgtcttacaacgcctccaacaacgagctggtgcgcacccagaccctggtcaagaacgccatcatccaggtggacgcaacccccttcaagcagtggtaccaggtgcactacggcca

SEQ ID NO: 238 - DNA, 405 bp, Chlorella vulgaris
agggcaacatgccccgcaccggtgacgtgatgatcctcaagtctgacggcaccctgaagcctgtgaaggacttcaccgcccagatccagaccctggacatccccggcgaggtcaaggccggctactcccccatcggctttgtgcggtgtggccgcgccgcctgcaggatctccaagatcaactggaaggttggcaaggagactggtggcaagaagctggaggagccccacgggctcaaggccaacgagatggccgaggttgtgtttgagccctgccagccgctggtcgtggacagcttcaagaactgcgagggcctgtcccgcatcgccttcctggacggcaacaccgccgtcatgcttggcaaggtggtggccacctccgccaaatgagcatagcagcagcagc

SEQ ID NO: 239 - DNA, 387 bp, Chlorella vulgaris
cccacgcgtccgcacacatctgcgtactgctggccagggcttgtgaaaactcgcccagtcatggctaagctatacctgttggatctaacagtcggcgctttcggcgctgtgctgtcgggcatgacattggtcacgagatggggacagttcactcgttggcacgggctcacccacctagtcgctgggttgctgtttgcggcaattccagcgttctctttgggttggccacggttgtatacccagcagagagaaacgctgcttgttcttatcaaaacgctgggcatcctagtgaggggaagggcccaagtacggcttaaccagccaccctcaggcaagctagcgcgggacctggtgagcagcttcgtaggcctgcggctgttgacaatc

SEQ ID NO: 240 - DNA, 324 bp, Chlorella vulgaris
cccacgcgtccggcggtgtgcacgctgcgagtattggtgtgctaagtaaagcttgtcagcatgggcaagtgcggcaagggaactggaagctttggtctgcgtcacaccaagacgcacggcctctgccgtcgttgcggcaggcgctccttccacctgcagaagagcacctgcagctcttgcggctatcccgctgctaagatcaggaagtacaactggggcaagaaggccatccgcaggaagaccaccggcaccggccgcatggcgcacctcaagctggtgcacaggcgcttcaagaacggcttccgggagggcactgaggccaag

SEQ ID NO: 241 - DNA, 395 bp, Chlorella vulgaris
aggctccgcgcccttcatgcagcccccggccctgcagctgggctacaccgtggcggagaccgcccaggtggccagcgtgaccctggacctgccggtggtggtcaccaagttctgccagccggtggaggtgcccagggacgtgttcacaacccgctggaaccaggtggtgggcccgcccttcaagctgaccgagcaggtgaggcggtccacccccgcctcctcctctgttgtcgaccacttgctggcctcagtgaacctcaagacactgccggggctcgacccagagccaaccaacatatccgcggcctgcgtgttccactccggctcaccccagacacggcaggtcccctgcatggtgcgcatcgaggtacacaaggtttcccacctcaagtttg

SEQ ID NO: 242 - DNA, 289 bp, Chlorella vulgaris
cccacgcgtccgcccacgcgtccgtgaagaagtacgctgatgggcgcaaggagattgaggcgcagctggagcagctgaagaagcactgcagcgtggtgcgcgtgattgcccacacccaggtcaccaaggtgcccatcggccagaagaaggcgcacgtcatggagatccaggtcaacggcggcagcgtggcccagaaggtggactttgcctacggcctgtttgagaaagccgtgcccgtgagcaccgtgttcagccaaaacgagatgattggacacatcgccatcaccaa

SEQ ID NO: 243 - DNA, 404 bp, Chlorella vulgaris
agcccacgcgtccggggggttgcctcagccagtgaatatctccggtctactcgcttggtgtcattttcatggtccatggctgatgcagcatgtaccctcgttcatagatagcttcacgatacctattcaactcccgtgtccgttagttatctgttctgttagtattagcatgggtggcgggtagtgcgaacagggagtgagagctgggctggtctggactagtatatttcatggtcttgctattaaatactacttccttgcttatatccttgaatgacttgtttcctgctgtacctttgctacgttgttcaccacttacctcagtatgggatcattatgataagctcttcttgctttgctcgctttgcttttaatctatcctgaagccctactgcaagcctcgg

SEQ ID NO: 244 - DNA, 405 bp, Chlorella vulgaris
  unsure (1)..(405): unsure at all n locations
cccacgcgtccgcccacgcgtccggcaagatgccgatccagggcgggcacaagtaccaccagtatcaggtggtgggacgccaccttcccacggagagggagccggagcctaccgtgtaccgcatgaagctctgggccagcgaccctgtcagggccaagagcaagttctggtacttcctgaggaagctgcgccgggtcaagaaggccaatggccagatcctggcatgcaacgagatctttgagaagcaccctaccacggtgaagaactacggcatctgggtgcggtaccagtcgcggactgggtaccacaatgcgtacaaggagtaccgcgacaccaccctcaacggcgccgtgtcgcagctgtatcaggagatggcctcccgccaccgggttcgccnacagtcga

SEQ ID NO: 245 - DNA, 404 bp, Chlorella vulgaris
gagcggcttcacaatgtccaagcggaccaacacagtcagcattgtgggcaagtacgggactcgcaatggtgcgagtctgcgtaagcagataaagaagattgaggtcagccagcaatcgaagtacgtcagcaccttctgcggcaagttctccatgaagcgccaggctgtcggcatttggcagtgcagggcctgcaagaagacccttgctggtggcgcctacgtgtgaaacaccgacggagccgttactgtccgctccaccatcagccgtctacgcgagcagattgagaactgtgcaaccaaacctacataggcagccgctacatcagcagcaacccagacacgagctcaacgtgcaggctccgtggatgccagtattttggggcgccgaccatgaaagacttggg

SEQ ID NO: 246 - DNA, 403 bp, Chlorella vulgaris
cccacgcgtccgcgtggaatcccccgtcgacaacaggtccaaggttcacaagatgcagaccctctctgcccgtttcggcgtccgcgcccctgtctcccggggcacccgccaggtgacccgcgcctccgtggagtggtacggccccgaccgcgccaagttcctgggccccttcaccaaccccccttcctacctgaagggtgagttcgctggcgactacggctgggacacctctggcctgtccgccgatcccgagaccttctcccgctacagggaggttgaggtgatccatgcccggtgggccatgcttggcgcccttggctgcgtcgtgcccgagctgctggaccgcaacggcaccgtcaactttggcgagaacgccgtgtggttcaaggccggtgccgccatc

SEQ ID NO: 247 - DNA, 381 bp, Chlorella vulgaris
tgcttgtttgtgcccctggcgtgcttctggggtgccagagtcagggctgtaaggtggtatgtgcacaggatgggctgcctacctgggtttgccaggtgctggtcacgagacctactgtggaagaagccatgcagcttgtcactgacatagaggctgagatacagacgaacatgcctatcgacccgcttcccaagcactagcagttcaatgctggaggcagcacttggcaggccctgggttacgatgggaagttaggcgtgcttgtagctgtgcacttgtgaggcatattgatctgcactgattgttgtcctcgctctggttacatacagtttttctgcagggagccttcatttttcattccggacagttaaactttccaca

SEQ ID NO: 248 - DNA, 364 bp, Chlorella vulgaris
agaggggtggttggtggagaccctgcccatcagcagccatgggtatctcccgcaatccgcttcaaaacccccggccaacggaaggaaaccaaaagctttgcgttagaaaaaggaatattaactccggcgccaaacccgccatgacaaaccggtcctcaaacgtgacattaaggcttgtccgcgtgcgcggaggaaactcaaatttcagggctctgcccctagactcggaaaatttctcctggggctccaaggctgtgacccacaaaacccttacccggaatgtgtcatacaacccctcaaacaacaagctggtgcgcacccaaaccctggtcaaaaaccccatcctccaggtggacacaacccc

SEQ ID NO: 249 - DNA, 363 bp, Chlorella vulgaris
aaacaaacaagcgaacatggcacgcaccaagcagactgcacgcaagtctaccggtggcaaggcgccccgcaagcagctggccaccaaggctgcacgcaagtcagcccctgccactggcggtgtgaagaagccccatcgctacaggcctggcaccgtggccctgcgtgagatccgcaagtaccagaagtccactgagctgctgattcgcaagctgcccttccagcgcctcgtgcgtgagatcgcccaggacttcaagaccgacctccgcttccagtcccaggcagtgctggcgctgcaagaggccgccgaggcctacctggtgggcttgtttgaggacaccaacctgtgcgcgattcacgccaa

SEQ ID NO: 250 - DNA, 330 bp, Chlorella vulgaris
ctacatcgcgaccagcatcgcacgcatcaagacacacggcacgtaggtctaccagctggcacggctcccagcatgcagctggataccacagcagcaagcaaatcagcccctgcaaattgccatgtgaacatgcgcatctctgacagcatgacaacattacccagctctagatactgatcttgcatagttccactgatcagccaattcacaagctgcccttccaacgcctcatggcgtgacatctcccaaggattcaaacatagattccgtttcaagtaccatccagtgcttgcactgcgtcaagccgcctaagtccacctggcgggcttt

SEQ ID NO: 251 - DNA, 54 bp, Chlorella vulgaris
agcctgtaggctacagtttgagggagcatcaccatgccggcgggacagggctac

SEQ ID NO: 252 - DNA, 263 bp, Chlorella vulgaris
cccacgcgtccgcacgatcaggacacgaaagttcatgaccaaccgcctgctgcagcggaggcagtttatccttgatgtgctgcaccctggccgtgccaatgtctcgaagactgagctgcgcgagaagctgtccaagatgtacgacgtcaaggactccaactgcgtgtttgtctttggcctgaagacccagtttggtggcggcaagtccacaaggtttggcctcatctacgacaacgttcacgggggcaagcagttccagccca

SEQ ID NO: 253 - DNA, 263 bp, Chlorella vulgaris
cccacgcgtccgggaggaggcggtggatgtgctctccaaggcgcctggcgtgtccatcattaatgatcgccaggccaaccgcttccccacgccgctggatgccgccaacgaggacaacgtgtttgtgggcagggttcgccgcgacatcagccgcagtgataaccatggtctcgacctttttgtgtgcggcgaccagatcaagaagggtgccgcgcttaacgctgtgcaaatagcggagctcctactctgactagactgatgat

SEQ ID NO: 254 - DNA, 395 bp, Chlorella vulgaris
  unsure (1)..(395): unsure at all n locations
gcaatggtgccccgctcagtgaccatggccctagcactgcccatctctgagcaactggaggcccctcaggcaatcaccgcagctgccgttgtgctcacgggcatcgtgggagccaactttgtgcagaccttgctcaacgccctgcgcttcagggaccccatagccagagggctggctgctgctgccacggctcatgggttgggcacagcggccttagcagggaaggagcccgaagcactcccctactgcgccttgtcatatgccatgtgcggcattgtagccaccatcctggcaaccgtgccattgataagagatggcctggaggcaataactggctaggttgtgggcacaacatgggagttgttggtgatctccgcancctgggtccaggatgc

SEQ ID NO: 255 - DNA, 367 bp, Chlorella vulgaris
gcgacgatggtgctgtcgtgcgacatcgatctcctgcatcctccccaggagctggagaagcggaagcacaagctcaagcgccttgtagcttctcccaactcctatttcatggacgtcaagtgccaggggtgcttcaccatcacgaccgtgttcagccactcccagacggtggtggtgtgccccagctgcaacaccgtgctgtgcgtgcccaccggcggcaaggcccgcctcacagagggctgctccttccgcaggaagggcgattagtcaggggaggcgctacgctggcatgtggtctcaagaaagtgcgccgccgcggcttgaggactcttgccagcgggacagcgcggcctatcaggacaggaac

SEQ ID NO: 256 - DNA, 403 bp, Chlorella vulgaris
agcggacgcgtggggtccaagccccttcagcaaaagatccacgatgcagaccgcctttgtccgctccggcctccgtgccgccgtccccaccgctggcaagggcacccgccaggtgacccgcgcctctgtggagtggtacggccctgaccgcgccaagttcctgggtcccttcaccaaccccccctcttacctgaagggtgagttcgctggcgactacggctgggacacctctggcctgtccgctgatcccgagaccttctcccgctacagggaggttgaggtgatccatgcccggtgggccatgcttggcgccctgggctgcgtcgtgcccgagctgctggaccgcaacggcaccgtcaactttggcgagaacgccgtgtggttcagggctggtgccgccatc

SEQ ID NO: 257 - DNA, 288 bp, Chlorella vulgaris
cccacgcgtccgcggacgcgtgggcggacgcgtgggtggatgcagaatgagcctgagtcttgcctgagttctgagccagttaatgttctgatactttgacattgaccgcaccacctctcttggggttgccctaattaaagccttacccatggcataataaaatgacacaagtaaataaacatccacaaacaaaaacaataaaaaagggggggccgtccaaggggttcaagctttaattcccctgtaagtgaagttcaaactcctccaaagggggcaaccaaattcaat

SEQ ID NO: 258 - DNA, 354 bp, Chlorella vulgaris
cgtttgagggcatgtgcataaacgagttccgcgggctggacttcgagccggaggccggtgaggcgggcagcagcaccaccggcgagcaggtgctgcaccgcttgggttttgcggaggacaccgtccaggcgacagcgctgcgccagggccgcatcctgctcttctactacttcctcaccttcaacatcctcaaggccaagaggcccaggtaccagaagctgctgccgcccaagcccagggccctgccacctgtagcggacgctgatgccgcagcggctgagctggggctggcagcgcacctcagcgggggtgtcgtcactgagggtgtcacactggcatgaagtggcgggcgct

SEQ ID NO: 259 - DNA, 390 bp, Chlorella vulgaris
agcccacgcgtccggaccctcaagacttactatcagctgcatttcagccagtagaacagagcagtcatggcgtcccagctgcttgccacccgccctggcctccgtgtggcccctgccaccagcactcgcctgagccgccgctccgttgttgtgaaggccgccaacctgagcaccatcgagaagcagtacaaggagttcagggtcccccagatccctgtggccaccgtgtttggcattgccggctggctggtgcccgctgctagccccgcccctgccttcggcggtcgctctctcctgagtgtgttcaccgagagcatcggccaggagctttcccacttccccaccggccctgctctggactcccagtttcggctctacctggccattttc

SEQ ID NO: 260 - DNA, 408 bp, Chlorella vulgaris
cggacgcgtgggcggacgcgtgggcaagtttgcctgaggcaccttggttggagtgatgctaggagccctggaaagccacccagttcagattttggggcagatgtacctgcgctctgtacatgcttgtgcttctcgcctcgccaagggcaggagctctagtccaaactaaatcctctcacaagcctgaccctcaaccccaaccatccgtcccagggagcacgaccttcaccctggcggggtgccctggggcagcccctgcagattttgtggatttggctgctgcatgctggttggttcaatacactcatgcatatgcttctccttatgccgcttatacccaggctatcgcgatacaatgaaaacatgatatgaacctgtgtcggcatccaatttatgttgcattgggtt

SEQ ID NO: 261 - DNA, 392 bp, Chlorella vulgaris
agcccacgcgtccggtacattgtgcgaccttgatcggccacccaagaagatggcaacgctagcgactctccggcttgcaccccagcctctgcaggggcgcagcaacagcagtcgtcgcacgggttgcagccgacttgttgtttgtagcaagaagaagcaccataaggctgctggcaggggtccagagcctgttgccgcgaaccaggaccagcagcgccaggtcatccaggaccggctggcagcgcagaaacagccagccaagactgatgctccctctgagccccgacccaagagcctgcagagcatggaggcagatgaggagttcaagcacatgcctcaagtccagaagtggttccttgagggcaaggcggcgctgtatgcctggctgggga

SEQ ID NO: 262 - DNA, 387 bp, Chlorella vulgaris
cggacgcgtgggcggacgcgtgggcggacgcgtgggcggacgcgtgggcacggtttgccgcagctttgccgtggagtatgagttctggggagagatgcgcacgcaggagctcatgccgggaggctctgacatccctgtgaccgctgagaaccgttccgagtacgtgcggctgtatactaagtggctactggacacctccatcgccgcccagttcaaggcctttgagcggggattcaccaaggtgtgcggtgggccagccctgagcctgttccgcggggaggagctggagctgctggtgtgtggcctaccacacctggactttgaggagctggagaaggcggcgagctatgaggggggctacaccaagagcagcgatgctgtcagatg

SEQ ID NO: 263 - DNA, 408 bp, Chlorella vulgaris
gcttaggcgttcttggcaccatggctgagaagtcatgcacgatcaggacacgaaagttcatgaccaaccgcctgctgcagcggaggcagtttatccttgatgtgctgcaccctggccgtgccaatgtctccaagactgagctgcgcgagaagctgtccaagatgtacgacgtcaaggactccaactgcgtgtttgtctttggcctgaagacccagtttggtggcggcaagtccacagggtttggcctcatctacgacaacgtccagggggccaagcagttcgagcccaagtacaggctcatcaggaacggtctggcgcagccggtgcagaagtcgcgcaagcagcagaaggagcgcaagaaccgcaccaagaccatccgcggtgtcaagaagaacgcagtggccggca

SEQ ID NO: 264 - DNA, 402 bp, Chlorella vulgaris
tgatcgtgctactcctagaccacctagaaacagtagcaccatgcagacccagagcttcgccaggggcaccgccctccgcacccccgtgcaggccaaggtggcccggccacagcggaggagcgtggttgttcgtgccgacggcttcatcggcagctccactaaccagatcatggtcctcagcacgatgctgcccatcatcgccggccgctttggcctggcccccaccgccaagctcaggaccacttcttctgtcaagctttacgaggacaagtccgtgagcctggggaccaacgaccccgccggcctcaccgccactgatgtgcttgctctgggcgcccttggccatgctattggcgtcggcatcgtgctggggctgaaggctaccaacaacatctgagcttt

SEQ ID NO: 265 - DNA, 351 bp, Chlorella vulgaris
ctcaggttgtaaaaaagcgtcgccatggcttcaaaaaggaagggcggcgttggtggcaacaagttcaggatgtcgctgggtttgccagtggccgcaacaatcaactgcgctgacaactccggcgccaagaacctgtagatcatctccgtggccggctggggcgccaggctgaaccgcctgcccgccgccgcccccggcgacatggtgatggccaccgtgaagaagggcaagcctgacctccgcaagaaggtgcaccctgcggtggtggtgcggcagcgcaagtcctggaggcggaaggacggcacctacatctactttgaggacaatgcaggcgtcattgtgaaccccaag

SEQ ID NO: 266 - DNA, 280 bp, Chlorella vulgaris
cccacgcgtccgcgccgcccggccagaaggtcggcctcatcgccgcccgcaggacaggtcgtatccgcggtaccgccattgtcaagcccgacaaggagtaagcgttggcaaaggaggcggcggcagcagtgcagccgtaaagggctggcgggaatgggcagcggtggctcttggcggcggtgtgctggtgttgcggctgccctacctgcctttagaatcgatgtgtgcagaggtcaaatcttgcagaagaggctgcagcaaggccggttgtgtaataggg

SEQ ID NO: 267 - DNA, 374 bp, Chlorella vulgaris
ggggagcgcgtcaggttgtacgtgagtggcaatatcctcggatacaagaggggcaagtccaaccagaccaaccacacctccctgatcaagatcagcggcgtcaactcaaaggctgagaccgaattctaccttggcaagaagattgccttcatctacaaggccaagaccgagaagaagggcagcctttatcgcgtgatctggggcaaggtcacccgtgcccacggcagcaccggcactgtccgcgccaagttcaggaagaacctgccacccagctccctgggcgccaaggttcgcgtcatgctctaccccagccgtatctagtggactgaagcggcgccgccagctggcgggcagcatgcacggcagcagtggcg

SEQ ID NO: 268 - DNA, 198 bp, Chlorella vulgaris
ggtaccggtctagggacctccggctcgacccaagcgtcaggtgagagcctaagtagcgtaccagacgttcttgctacactagaagacctttagctgttaagcttcctgacccatctcgacgcgaccaactcacctccggattcgcgcaaggctcggctggactcgccgtgcaggcacctatgcggctcaccgagcaac

SEQ ID NO: 269 - DNA, 391 bp, Chlorella vulgaris
gtctcgcaatagttccagggcaatcactatgcaggcaaccatgatgaagaccttcggcgccagcctgcgcaaggctgtgcccacccagggcaagggcacccgccaggtgacccgcgcctccgtggagtggtacggccctgacagggccaagttcctgggccccttctctgagggctccacccccagctacctgaagggcgagttcgccggcgactacggctgggacactgctggtctgtctgccgatccccaaaccttcgctgcctaccgcgaggttgaggtcatccatgcccgctgggccatgcttggcgccctgggctgcctgacccccgagctgctgcagaacgccggcgtggccagcttcggcgacgctgctgtgtggttcaaggct

SEQ ID NO: 270 - DNA, 367 bp, Chlorella vulgaris
cagaggtacagcggcatcgagttcggcgaggctgtgtggttcaaggctggcgctcagatcttctctgacgacggcctgaactacctgggcaaccctgccctcatccacgcccagtccatcattgccaccctcatcacccaggtggtgctgatgggcgccgttgagggctaccgcaccaacggcggcggctgggagtgggccgagggcctggacaacctgtaccccggcggcgactactttgaccccctgggcctggccgacgaccccgaggccctggcctaactcaaggtcatcgggatcaagaacggccgcctggccatgggctccatgcggggcttcttcgtgcaggccatcgtcaccggcaagg

SEQ ID NO: 271 - DNA, 417 bp, Chlorella vulgaris
agcccacgcgtccgacttactaaagatcgcagccatgggtggggagcgcgtcaggttgtacgtgagtggcaatatcctcggagacaagaggggcaagtccaacgagggcaaccacacctccctgatcaagatcagcggcgtcaactcaaaggctgagaccgaattctaccttggcaagaagattgccttcatctacaaggccaagaccgagaagaagggcagcctttatcgcgtgatctggggcaaggtcacccgtgcccacggcagcaccggcactgtccgcgccaagttcaggaagaacctgccacccagctccctgagcgccaaggttcgcgtcatgctctaccccagccgtatctagtggactgaagcggcgccgccagctggcgggcagcaatgcacggcagcagtggcgat

SEQ ID NO: 272 - DNA, 300 bp, Chlorella vulgaris
aaaaaaacgtccgcccacgcgtctgggcggctggcggccaacgaacgcaaggaccctggcatggctgacaagcaagtggcctcatgtggcctgactcaagcagcatcattgtcaggcaggtcgcaagtcggacacattgtcagggcccaacagtgacatccctgactggctcgaggaggaggtttacaagtagctgaccggcttctatatcggcggcggccattcaggggacctagggatgccgggaatgctgaggcagtggacaaagggtgccagctggccgggggctgcactggtttg

SEQ ID NO: 273 - DNA, 410 bp, Chlorella vulgaris
aaggttcacaagatgcagaccctctctgcccgtttcggcgtccgcgcccctgtctcccggggcacccgccaggtgacccgcgcctccgtggagtggtacggccccgaccgcgccaagttcctgggccccttcaccaaccccccttcctacctgaagggtgagttcgctggcgactacggctgggacacctctggcctgtccgccgatcccgagaccttctcccgctacagggaggttgaggtgatccatgcccggtgggccatgcttggcgcccttggctgcgtcgtgcccgagctgctggaccgcaacggcaccgtcaactttggcgagaacgccgtgtggttcaaggccggtgccgccatcttcggcgatgacgggctgaactacctgggcaacccctccctcatcca

SEQ ID NO: 274 - DNA, 375 bp, Chlorella vulgaris
gtttagttaggtgcagcaaccatggggcgccgcccagcaaggtgctaccggcaaatcaaggggaagccgtaccccaagtctcgcttctgccgtggtgtgcctgactccaaaatccgcatctacgacgtgggcgcaaagaagtctggcgtcgatgccttcccttactgcgtccacatggtcagctgggagaaggagcacatctcctctgaggctcttgaggcggcccgcattgctgccaacaagtacatggtgaagaatgcgggcaaggacgcgttccacctccgcgtgcgcgtgcaccccttccacgtgctgcgcatcaacaagatgctttcgtgcgccggggctgataggctccagaccggcatgcgcggcgcc

SEQ ID NO: 275 - DNA, 288 bp, Chlorella vulgaris
agctttgatcttgatttgagggcttgccttgtcgcgggagcattccggcttgggtgcgaacccttgcacaagctgccgcaaccagctatttcgccagttgaggatacaagaacagcaagtgcaaggcccagctgggcttgattggctctgctgaggaacgatgactcgaggactggcagccctggcgcgccgtgccgggcaagcaaggcagatcatggctgtgcggggcggtggtggcgggcctctggccaggccccagcctcccacacaggcgctcatggaggagga

SEQ ID NO: 276 - DNA, 404 bp, Chlorella vulgaris
acgggccaagcggctcaacgacaccgtcaaccggctgaacaagaccaagcaggagcggtaccccgacttgaaggcggagcgagaggcgtacgacagggagcagcggtcgaaagagaaggcgcagctacaggctgagcggcgagcggagaaggaggcgcgcgaggagacgcggcggcaggaggagctgcggtcctacaaggcgctgatgacgcaggagcacatggtcacgtccaaggagctgggacagaagtacacctccgtggaggactacgaggacgacttcatgtgatgccaggccgggtatatgtggtgaagatggcagcctcaaggagctagggtgcaagtgcgccctcttcccatgggtgattggcatgtcgctgccacacgtagtaagcaacagtgat

SEQ ID NO: 277 - DNA, 382 bp, Chlorella vulgaris
ccacgcgtcagccaacgcgtccgcggacgcgtgggctgctgggcaagttcgagctgaccgggatcccgcctgcacctcgcggcgtgccccaaatcacagtgaccttcgatgtggaggccaacggtatcctcaatgtgtctgctgaggacaagaccaccggcaacaagaacaagattacaatcaccaatgacaagggccggttgagcaaggacgagattgagcggatggtgcaggaggccgagaagtatgcctcggaagatgagtcacaccgcaagcgagtggaggcccgcaacggcctggagaactatgcctattccatgcggcacaccaccaaggacacagctgttgctggcaagctggcaaacgaggacacagagaagat

SEQ ID NO: 278 - DNA, 405 bp, Chlorella vulgaris
gcggtgtgcacgctgcgagtattggtgtgctaagtaaagcttgtcagcatgggcaagtgcggcaagggaactggaagctttggtctgcgtcacaccaagacgcacggcctctgccgtcgttgcggcaggcgctccttccacctgcagaagagcacctgcagctcttgcggctatcccgctgctaagatcaggaagtacaactggggcaagaaggccatccgcaggaagaccaccggcaccggccgcatggcgcacctcaagctggtgcacaggcgcttcaagaacggcttccgggagggcactgaggccaagcccagggcagttgctgcatgaagagcttgtcagcgacactagggacagcgcagctctgagacagtgcagctatgaatgtaaatttcgatgacg

SEQ ID NO: 279 - DNA, 404 bp, Chlorella vulgaris
cccacgcgtccgcggacgcgtgggcagccagtcgactcggagcaccatggcagcgatggcttccctgaccgccaggaccgccttcgtgggcaagacccactcccagccccgccaggcggcgaggaggagcagcgtggttgtggctgccagcaggcccatctggtaccctggcaacgatgaggtggtgcccccttacctcgacggcgagctgccaggcgactacggctttgaccccctgcgcctggctgacgaccccgagaaccgcaggtggttggtccactccgagatcttccacggccgcgtggccatgaccggcgttgcgggcatcctgtacacctcgctggccaatgcctccggccaggacatccccgagtggtttgatgccggcaaggtgtacgctgaga

SEQ ID NO: 280 - DNA, 329 bp, Chlorella vulgaris
cccacgcgtccggtcgcctgcactgtccgatatggcgtctgccctggtcgctacccctcttgtggccaaggcctctgtgaggtctaccggtgttgcaaggcgtcaggctgtggtggtgaaggcccagcagcaggagagcaggagggcagttctgggcctggttgcagcatctgtgctgggtttggcccttgtcccccaagcggaggctaaccaggctgcgccgaagaatggctttgtggccacagcagagggttatgtgatggaaggcaccaagaagcagggtatctcccccaagaggaagcgcgagattctcgacaagctcaaggctg

SEQ ID NO: 281 - DNA, 375 bp, Chlorella vulgaris
cggacgcgtgggcggacgcgtgggcgcagttttgtgtgtgcattttcatccaaactggcaagcactttatatgaagaggagcctggatagagggccacgttgcttgcccatgctgttgtgctatataacgatgttgatgctgcaataacttcgcattgttgctttcatttctttcttgtactatgaggcgtggtgctacctagcgcccaaacataagctggcatccaggcaggttgtgtgatatcatcatgatgtaatccaagctggggtcaaaaagaaaaaagaaaaaaaaacaaacaaaaagaaaaaaaaaaagaacaaaaaaattgtagaccaaaatcacaaaaaaagaacttaaggacctgcagcacccaa

SEQ ID NO: 282 - DNA, 393 bp, Chlorella vulgaris
ctgcattggctcactagcgtctccctagccttgcccaaatttcagtccataaacaggaaccatgcagtgcgccatgtccctgaccgtccgccccacccgtgtattcggggccaagcccatgaaggctcgcgctactcgcggcatgaaggtgcaggcctacaaggtcaccctcaagacccccagcggcgagagtgtgatcgagtgctccgaggatacctatatcctggacgctgctgatgaggctggcgttgagctgccctactcttgccgcgctggtgcctgctcttcttgcgctggcaagatcgagtctggcgaagttgaccagagcgacggctccttccttgaggacgagcagattgccaagggctttgtgctgacctgcgtggcataccc

SEQ ID NO: 283 - DNA, 270 bp, Chlorella vulgaris
cccatgcgtccgggatgaaccgcgcagcgatcaccagcagtagccaccccagtctgcacggcaaacttcggataaggtcttcagatacaatggtccaataggcagctgagcaagatcgagggcaagcaacttcacagcattctgtctgacaaatactgaagggggcctagtccaatgcagcatcgagtccaatgcagtaaggcaacgtcaccaggccgtgctgctgcgaatccccagatgtgggacctattgacgggaatgcacggtatc

SEQ ID NO: 284 - DNA, 364 bp, Chlorella vulgaris
cccaagcctcctgtacaattgtttgtattatcatggtagctgtcttgtgctatgacaatcttaaccatgcatcatggtcggttctttgcgtactcaacttgctatattgtgcaacggcgtatacaataagatcacatgtacagttatctagctggtaaaagaaggccccacaacactcaaagaaaaaaaaaaaaacaatcataaataacctgtggaaacaaacactgtgggcttcatgggcgctgtcatgattcgccgcatggtgggcatcgctcatgtggctgagatcaagtgcatacaagaccctgacgtcagggctgtctgcgagcggcgggtgttgcagctgggccggcggctgctggta

SEQ ID NO: 285 - DNA, 336 bp, Chlorella vulgaris
ggcaagcccgtgtccgctctgcgcgcctaacgggaagcggtgccggtgggccaggaggcctttgggctggtccactccacggtgcagaaggcgcggtacgagctggtggcccacctggtgaaaatggggcgtgaggatgaggcgatggacctgctggtgagcggcgctgaccagctgctggccaaggcagaggagcttgagcaggaggagaagcagcaacaagatgacaagcctgcgacaaacggcgagagcaaggaggacccagcagcggccacttcctccgccacgactgagcacgggcaggcagcagcggccgggccttgacgggaagggggt

SEQ ID NO: 286 - DNA, 344 bp, Chlorella vulgaris
  unsure (1)..(344): unsure at all n locations
attgcctttacataggtcgctcgactacttgggttttctacagtagccgaggcctaggggcgaagggtgcttcttcactcagacacggctcctgccgatcgtctgangaaccgtgcatcatgacttcgaagttccctgcaaacgcaatcacaaaggaacccgcgccgacgactataatgaacaaccttaaagaaatttggccctttggtgccggcttccccccaactggctaaatcctcaaaaaggttgccctgtcagtgacaaattgaggatttgaaaaacccaaattttgccaaccccaagggccaaagccactgacccctgaactggcaggcacctggaaa

SEQ ID NO: 287 - DNA, 407 bp, Chlorella vulgaris
ccgtgattgggagtggccacaccaaaagatcttatggagttgtcaagtccagataaccgatctgcgtatgatcggcactcaggttaggcatagtgctcatgtgccacagatgcctcatacccttcaatctagatacatactttgccaggcatgaggaaagcgtgccccatcacctgtgctgcaacgactcccagaccatgtgcacctgtcatagttactgtacctggaggtcgatagacattaagcaaaggtgcgagtccatgtacttggcctagacatgaggctcatcgactgctagccttacaggaggccaacgcagtgtgccctgactttacacgaagatctcaccaaatgacctgcacactgcagcccccaaagaggtttacgagctggcagtgctggatctg

SEQ ID NO: 288 - DNA, 199 bp, Chlorella vulgaris
cccacgcgtccgcaagaacaggtcccttgaggggcttcaggagaatgtgaaccgcctgaaggcctacaaggccaacctggtggtgttcccgcgccgcgccggcaagcccaaggccggcgatgccagcgcggaggagctcaaggcggtcgcgcagctcagcggcccggtgctgcccgtcacacgcgctgcgcccgctctg

SEQ ID NO: 289 - DNA, 414 bp, Chlorella vulgaris
gtcaagctgaacaaggccgtgtggagccagggcatcaagaacgtgcccaaccgcctgcgcattgtgatccagcgcaagcgcaacgaggacgacgacgagaaggaggagatgttctccctggtcaccctggccgaggaccagagcagcaagggcaagggcgtggtggtcctggaggcataaacacacacacgcgcctcgcggggggagctgccgcagcagccagctggcaggttccgtgcctggggatcgcgctgggcctcgcgtgggccttgcctttcaaacggttggtgtgggcggcgtttctggcggcgtttagggtctcttgcagacccttggtcgttgtgcaggccccagatgtcgctgtatcgaacccagctggcggtgccctgttgcggtgcttctggctcactgtgg

SEQ ID NO: 290 - DNA, 411 bp, Chlorella vulgaris
cccacgcgtccgcccacgcgtccgggcacccactttcaataaccccaagcggactgcaaccaaggaccggcagggcgacgagtctgtggagcacttgctgctgcgactcataccacgcccatctgcaagaacagtatttacagacgatgtggttgccttcaccagtccttttgcggcatccgccgtggcaccaatcgcagcgccgggcagcgtcatggtgcagcgcgtggcagctgtggagggggatgagatggtttcggacgacgcggaggaggagggctttcaaattccgcaaggccactgctgggtgttggcagacaaccccgaactggagcctccccacgtcattgacagccgcagctttgggccgctgcccttctcctcaattctgggccgtgtcatgtactctgc

SEQ ID NO: 291 - DNA, 434 bp, Chlorella vulgaris
cccacgcgtccggcaaacccttaactcctaggtgcagcgccgacactaccgtactcccatgtccggcaggcccgaccccatcaccaaggctgcaaacgccgctagccctggagttccaaggagcataagagcaaggaccgggcagaccacagatccggtacctgagggtttccaggagtcctcgtcaccaacgcaccacctgccagtggagcctgctgagcacgatgtggaccgcaccaagttgaaggcggtggacgagatgggggtgagcgaccagcagctggcttccttcaagggcaattctgacatggagacggaggagaaggcaaggagctggtgcaccgtaacatgactgaggagatgacgcaccgcgccaacaatgctgagcagcagccacagaaaaaggtttcccaaagcccaaggcccgcccccca

SEQ ID NO: 292 - DNA, 72 bp, Chlorella vulgaris
agcccacacgttcgcccaagcgtctgaacgcaggctaaacacgtgcactacgctctgcaccaggttgtcatg

SEQ ID NO: 293 - DNA, 351 bp, Chlorella vulgaris
ggcaagatggcgcggggcccaaagaaacatctgaagagattgaatgccccgaagcactggatgctcgacaagcttgggggcatctttgcccccaagccgagcgcgggcccccacaagacccgggagtgcttgccgctcatcctgctgctgaggaacaggctcaagtacgctctgacgggcaaggaggtgacgagcatcctcatgcagcgcctggtagaggtggaccgcaaggtgcgcactgacaagacctaccccgtgggcttcatggacgtggtcaccatccccaagaccgacgagcacttccgcctggtctacgactgcaagggccgctttgtggtgcaccgcatcagc

SEQ ID NO: 294 - DNA, 366 bp, Chlorella vulgaris
cccacgcgtccgccatggcttcaaaaaggaagggcggcgttggtggcaacaagttcaggatgtcgctgggtttgccagtggccgcaacaatcaactgcgctgacaactccggcgccaagaacctgtacatcatctccgtggccggctggggcgccaggctgaaccgcctgcccgccgccgcccccggcgacatggtgatggccaccgtgaagaagggcaagcctgacctccgcaagaaggtgcaccctgcggtggtggtgcggcagcgcaagtcctggaggcggaaggacggcacctacatctactttgaggacaatgcaggcgtcattgtgaaccccaagggcgagatgaagggctccgctatta

SEQ ID NO: 295 - DNA, 420 bp, Chlorella vulgaris
cccacgcgtccgaacataagaactgaaaggcgaattccatgttcaattggtaacagctgtcgtgcgtgggagtggctttaccatgacagtgtcgctcttgacagtgtcgcgagcgccatttctagctgcacccgcagcacaaaggaggcaagatacgccgatacgacgtatatcagcgctttctgagcaccgaggcagcagcagcagcggctcgtcagggccaggcaggcgagggaagcacaacaagaaggctcgggcacctggactgtttgaggttcaggacatcagcccacccaagcggtctctgggcatacatgccttaccgccgactacacataatggggacgagatagaggtggagggcagcagctacgttgtgcagagcgtggtgatgcagttcaagcttgtgagggggcggta

SEQ ID NO: 296 - DNA, 233 bp, Chlorella vulgaris
ggtgatccccgtctcgcaatagttccagggcaatcactatgcaggcaaccatgatgaagaccttcggcgccagcctgcgcaaggctgtgcccacccagggcaagggcacccgccaggtgacccgcgcctccgtggattggtacggccctgacagggccaatttcctgggccccttccctaagggttcaaccccaacttacttaaaggccaattctcccgggaataacggtggg

SEQ ID NO: 297 - DNA, 410 bp, Chlorella vulgaris
ggcgcttcccacgccaagggcatcgtgctggagaagattggcattgaggccaagcagcccaactccgctattcggaagtgcgcgcgtgtgcagctgatcaagaacggcaagaagattgccgccttcgtgccccgcgatggttgcctcaacttcatcgaggagaacgatgaggtgctcattgccggcttcggtcgtcgcggtcatgctgtgggtgatatccccggtgtgcgcttcaaggtggtgaaggtgtctggtgtgtcgctgctggctcttttcaaggccaagaaggagaagccccgtaactgagcaagtggaggccggagaagcgctggtcgcgtggcggcagcgcctgtatcatcgttgttccttggcgtagatgctgtccctctcttactttccgcggctgctac

SEQ ID NO: 298 - DNA, 393 bp, Chlorella vulgaris
accaagggctgtggaggcgttttatatataaaaatgcctcccaaatttgatcccaactccattgtggaggtgtacgtgcgtgccaccggcggtgaggtcggtgccgcatcctccctcgcccccaagattggtcccctgggtctctcccccaagaaggttggtgaggacattgccaaggagacgtccaaggagtggaagggtctgcgcgtgaccgtcaagctgacggtgcagaaccggcaggccaaggtgaccgtcatcccctccgccgcggcgctggtcatcaaggcgctcaaggagccgcccagggacaggaagaaggagaagaacatcaagcacagcggcaacctgtcaatcgatgacgtgatcgaaattgcgcccatcatgcgcaaccgc

SEQ ID NO: 299 - DNA, 418 bp, Chlorella vulgaris
  unsure (1)..(418): unsure at all n locations
gattggcgagcacctcgccggcaagtcgggcggctcagacggcggctcctcagagaatgtccaggatgcggaggtgaaggataagtgaagggactaagcaaggccccttccggaggctcctgtcgtaggggacccttgcacagaggggctgtagaatgactgaggacgcttagtgaagacgctgtggcggcgggcgtgcctgggaggagtacttccgatgatgaggcagagggccaaagggaggttgtttgagggaggggaggatgaatgcagcaggggtgcatgtagcagaggangaggtaattggtgggctgccggccggctggcgccccaagctctgttaataatgcagctcaagctgggttctggccacagctgggttctggccagccctgtaacccctcccatctcttcagca

SEQ ID NO: 300 - DNA, 374 bp, Chlorella vulgaris
cccgaggccctggccgagctcaaggtcaaggagatcaagaacggccgcctggccatggtctccatgctgggcttcttcgtgcaggccatcgtcaccggcaagggcccacttgagaacctgctggaccacctggaggagcccggcaacaacctgtgggccctgtccgccaccctggccaactaagcggcccgccagccctggccagcaaagactgactgagcaggagtgacagccgtgaggtggtcgtgtggagtgcgaccgctgagaagaatacttgtgtgggtgtgtgcatgtaataagacctagcgcaaaagaaaaacagactagaaccccaaactctattaaaaaaacaacaacaaaacaaggtgctgacc

SEQ ID NO: 301 - DNA, 418 bp, Chlorella vulgaris
cgcgcacgtaaaggcggagcaggaagccaagctcaaggggcaggtggcacaccactgatggggtggcacttagtcagggagcttgctcgcggcgctgtgctcggcgggtggagcagacctggaggccaactggtggtggactttggtgccctccgtactgacacatgcacagctctgagaggctgctcggtgcccttgttggcctggcagggcagtggcttgaaagcacggcgcatgactggcagtcgtgccgctgcagcgcgctggggttgctggcgtttccccttgtgcatctgcaatagtgggtctggccggcacagtgacatgctggctctgggtcgtccagctagccttcctgtttcccatgtggcattgaaatgattatatgaaaggtgtagctgcgagttctcaccacggg

SEQ ID NO: 302 - DNA, 428 bp, Chlorella vulgaris
  unsure (1)..(428): unsure at all n locations
gcttgacgtacaagctgggtaacggagagggggcgcggctcatccctgtagttgccatgggaggatcctctccccatgccgctaagcgccatcctccccatgaagggcgcatctctgtggacgctgatggcagctctcgtaggtcttccccggctgttgtggacagcttagcgccaagcctatccgtagttgggggcggtgggctgctggacgggtctgatgtggaagcggcggtgagtcgatctgtggccaccccccgaagggcagccctgcagtctcacactgcccgctaggaggtagtgctgacagtgctgcttagttgggtggcattgggaactgtgcagtgcatggtaggatgccgggagtgatggctgtagggtangcanggttgtgtactactgagggtcaggttgggctgtgcagcccca

SEQ ID NO: 303 - DNA, 364 bp, Chlorella vulgaris
ggggtggttggtggagaccctgcccatcagcagccatgggtatctcccgcgactcgcttcataagcgccgggcgacgggaggcaagcagaaggcttggcgtaagaagaggaagtatgagctcggccgccagcccgccatgaccaagctgtcctccaacgtgacagtgaggcgtgtgcgcgtgcgcggaggcaactctaagttcagggcgctgcgcctcgactcgggcaacttctcctggggcctcgatgccgtgacccgcaaggaccgtatcctggatgtgtcttacaacgcctccaacaacgagctggtgcgcacccagaccctggtcaagaacgccatcatccatgtggacgcaaccccttc

SEQ ID NO: 304 - DNA, 80 bp, Chlorella vulgaris
aggggtggttggtggagaccctgcccatcagcagccatgggtatctcccgcgactcccttcaaaaaccccgggccaacgg

SEQ ID NO: 305 - DNA, 348 bp, Chlorella vulgaris
cgctggatcactcgcctttctcatactgtgttccaccgggttttagcaggtagtgcaaacagggagtagagctgggctgggctagactggactgacagggctggatgcaaaatgagcccgagtcttgcctgggtttttgtgtgttcccaaggagcttcccttttgcacgttgtgcttcgtattggcagtgttctgcggtgcaaccgcatttttggcagccattgagcaggagctcctgtgaatcgtccatgttgtaggcagttcaagccaagggatggtatcccgtggcattttggtcaattcctggtaatttccttcaaaagcatgggcctttccttgacaatcctt

SEQ ID NO: 306 - DNA, 189 bp, Chlorella vulgaris
cccacgcgtccgcccacgcgtccgcttagaaagcctttttagtggcgggacttggtgccctaggcgaaccaaaatgaccaggggagttttcctttgtctggccagctttccgcgtgaccagtacggcactgctctgttgactcttggtttttgtggtgtttccgcaatatcttttaacaattctgcctt

SEQ ID NO: 307 - DNA, 410 bp, Chlorella vulgaris
cccacgcgtccgcccacgcgtccgccccggctgagaaggagacgtcaacatggtggctgccaagaagagcaagaagtctcatgagagcatcaactctcgtctggcgctggtgatgaagtccggcaaatataccctgggctacaagaccactctgaagactctgcgcaacggcaaggccaagctggtgattatcagcaacaactgcccggctgtgcgcaagtctgagatcgagtactacgccatgctctcaaagactggcgtgcaccactacaatggcaacaacgttgacctgggtacagcctgcggcaagctgcaccgcgtgtcagtgctgacaatcaccgaccctggtgactctgacatcatcaagaccaccagcgagtaggtgctcacctagcaagaaggggtgctgg

SEQ ID NO: 308 - DNA, 426 bp, Chlorella vulgaris
ggaatcccccgtcgacaacaggtccaaggttcacaagatgcagaccctctctgcccgtttcggcgtccgcgcccctgtctcccggggcacccgccaggtgacccgcgcctccgtggagtggtacggccccgaccgcgccaagttcctgggccccttcaccaaccccccttcctacctgaagggtgagttcgctggcgactacggctgggacacctctggcctgtccgccgatcccgagaccttctcccgctacagggaggttgaggtgatccatgcccggtgggccatgcttggcgcccttggctgcgtcgtgcccgagctgctggaccgcaacggcaccgtcaactttggcgagaacgccgtgtggttcaagggccggtgccgcatcttcggcgatgacgggctgaactacctgggcaacccctc

SEQ ID NO: 309 - DNA, 372 bp, Chlorella vulgaris
ccgacgcgtcggcggacacatgcactgcaataggaactttgactgcaggattaacgtgtgccaccaggtgggcaagcaggcgttcatcaagggtttctgcaccgatgtcctgcccagcgtcctgcgtggtttcggccgtgcgctctagcaggagatgtataatttcatcaaccccttcaccgtgtccactgccttctactaagcatccaactgtgcagcctacggtggtgctccagctgtccgtcgatgtgtccgtttgagacctcctatgcgacttgcgactcaacctgacactgacacttggcaccaaatttggtaatggctccgttcaagcatccgttgtatacatacggtctcagcaaagggcttcac

SEQ ID NO: 310 - DNA, 377 bp, Chlorella vulgaris
  unsure (1)..(377): unsure at all n locations
cggacgcgtgggggaaggcagtgcatctgctgaggaccgaaacggacaaccatgcagattttctgcaaaacagacaggactcatgtccttgagcttagctccgaggccactgtggccgatgtcaaggctgccatcgaggccagccagggcatcccctgcgatgcgcagcgtgtgatgttctctggtcgccagctggaggaggaggcctccctggccgcctgcggcgtgtctgacgacagccagctgtacatcctgatgcgcctgctgggtggtgccaagaagcgcaggaagaagacctacaccaagcccaggaagcagaagcacaagcacaagaagatcaagctcagggtgctcaagttctacaaggtanacgacag

SEQ ID NO: 311 - DNA, 341 bp, Chlorella vulgaris
aaaaaacataaggagaaaagaaataaataaactaaagaacaaaaaaagacaaacatacaaattttctgcaaaaaaaaaaaagaatcaaatcattgaaacttaactgggaggccactggtgggctctgtcaatgctttcatctatgccatccatggcatctcctgctatgcgcatcctatgttgttctctggtcgctattttttggacgtcgtttccctggacgcctgcggcgtatcccatgatatccccctgtaaatcctgatgcgtttgctgggttgttccaatacgtgcaggaccaagaccgatgcccctcccaataagttgtcccacatgtagggcaa

SEQ ID NO: 312 - DNA, 385 bp, Chlorella vulgaris
gcgtgaacggcggccccgctggcgagggccttgacgccctgtaccccggcgaggcctttgaccccctgggcctggccgacgaccccgacagcttcgctgagctcaaggtcaaggagatcaagaacggccgcctggccatggtgtccatgcttggctttggcgtgcagggcctgctcaccggcaagggccccctggagaacctggctgaccacctggctgaccccaccgtgaacaacggctttgccgtggccaccaagttcacccccggcaactgagctggttgtcttgacggacgtttggctgtgctgcttgacaggctggaggtcagcattactatgctggccttgtcttgagaagaaaatccttgtgtaactagctatacatc

SEQ ID NO: 313 - DNA, 203 bp, Chlorella vulgaris
cgggccgagccacgcgtccacggaagcgtgggcggcgcacatgcattgcaataggcacattgactgcaggattaaggtttgccatcaggtgggccagcaggcgtgcatcaagggttcctgcaccgacgtacggggcagcgcccggcgtgctttcgggcgcgtcgagtggcaggcagatctacgactacatcacgccacagcac

SEQ ID NO: 314 - DNA, 361 bp, Chlorella vulgaris
cctaggaccactgcatccctcacacacggttgaggtgatagcagttgcgtggagcgatggccactaacatgaagattgctgcggccaccaaggccaacctggcagtggcccgctttggccgtttcaatgctgttcgccaggcggcagccaagggcttcaccgccagccgcaaggctcctgccatgccggcgatggctgcggtccagtacgattacgataccaaggtgttccagaaggagcttgtcaaattcgctgataccgaggagtacatcattaggggcggccgggacaagttcaacctgctgccggaggcgttcaagggcatcaagcagattggcgtgatcgggtggggctcccaggc

SEQ ID NO: 315 - DNA, 389 bp, Chlorella vulgaris
  unsure (1)..(389): unsure at all n locations
gggtgtctcactatcaacggctgtgcagtgcacctgctcctcgtcaagctctagagcacatcggcttttaagcatcatgaagttctggcaaaagctgaaggcggctgcgtggggccctgaggaaaccatgggtgaccggaggaacaccggctgggcacgacaggagggccctggcacacgtaatgaaggccctgtgtcctcgagggccgcccctaataactggaagcgccaagaagcacttgacaattgggcccgtgctactactcgtcccgaatataatgatctgattaggtaagcagtgttgccaaccatctgctagaacttgtaacgaggaacgtgctgccgcttaggtcagtcatgtcaatacctgngcggataccgtgaagaat

SEQ ID NO: 316 - DNA, 362 bp, Chlorella vulgaris
cccacgcgtccgcccacgcgtccggctgttttggagacccgtgcataagacctgccgccatgggtcgtatgcactccaagggcaagggcaagagccgctcggctctgccctacaagcggagcccgccctcttggctcaagatttccagccaggaggtgaacgagctcattggcaagtttgccaagaagggcctgaccccctcccagatcggtgtgctgctgcgtgacagccacggcgtggcccaggtcaagtctgtgaccggcagcaagatcctccgcatccttaagggccagggtttggctcctgagatccccgaggatctgtaccatctgatcaagaaggccgtgtccatgcgcaagcac

SEQ ID NO: 317 - DNA, 411 bp, Chlorella vulgaris
ggaacacaggaagcagtttagcccaccatctcactgtcgaacccgtctcgtacctaaatcctgtattacgtccaaggagggtccctgattgccagcacccaagaccatctgtccccttgcttgagtaaaactagcaggtttaaaaatgtgggatcttgttgctaccgccgctgctgggctgcacgctggtgcaggtctagcttgtgtggccgtggagcatcctgcaggcttggagacaggagttggcgagtattgggctctctttcccaaaagctcgacccgcggcctgaccctgtctaacgtgctctccgtcgtctcttgcggagccgcgctgggcgcctacctctccgtgcctgagggcgagcgggacccggcttggattcacgccgcaatcatggctggtgcagccat

SEQ ID NO: 318 - DNA, 333 bp, Chlorella vulgaris
gctgggtgcatcgagcatgttgactgcggccttggctgggtccaagatcgctactccgtccaaggaaccggtgtccaaagcccgggtttccgccgccggcaacccttcaattttcaaaaccaatggaaactacaattgaaacccctaggactggaaagataacccctcagacacggcgctgcttgtgtgtgacgtccaagagcggttcaagcagctcatctacggcttccctgcagtggtggacacctccaggcgtatgattcgagcagccaatgcgctggagctgccggtactggtgacagagcagtaccccaaggcgctgggcaacaccgt

SEQ ID NO: 319 - DNA, 308 bp, Chlorella vulgaris
cgaccctgccatggacacctggactcgacaggaggggaaccccgaccccaagctagacaactacaagcggcaagagggcaacccaaaccctaaaatggacacctgggctccccaagaaggcaacaaccaacctaaattggacaattatcagccggaagaaggcaattaagaacctaaggctgataactggaggcgcagctaaagtgaggttgttcatgcccgcggtatgacctactggttgaaggcggacaaaactgttgaagccaacaaggcatggcaaaaaaatacattttgcaaaaaacccactt

SEQ ID NO: 320 - DNA, 286 bp, Chlorella vulgaris
gttcgctggcgcagtgcagcagaggcttggatcggcataagtgcttgaaggaggttacgagggcttgacagcaccatgtcacgcgaaaacggaactgtcccaggctatcctcccccaggctaccctccgcccatggcttatggcccaccagggaacggatatgaccattatcccccgccgccatctgggtatccgccgccgccccctccagggtatcctgcaacgggtcccccagggtatccccagcagtatggcccgccccccgggtacccaggtgcgcctcccc

SEQ ID NO: 321 - DNA, 378 bp, Chlorella vulgaris
gttaagcgtccgtataacattggggattcattcttgaaccatctggacaccatgatcaaagggtatgtgcttagttccacgcgcgaatgtcgaatcatctgttcagggctcttgaagagtggacccttgcaacgtttgtttcactaagcaggactgtttggcagtgcatagcttgctgcctgagacagctatgtcgattttagcacccaagagtcgtgccaacatggtacacttatgaagcttctgtactgaagatcacctgacaagtaacacatttgactggccggctactttgtgcttcgtttgatgctgtatacatgctgtcttacggctaggcgtgtttcccactacctttccattgtttcgccatgggctgta

SEQ ID NO: 322 - DNA, 399 bp, Chlorella vulgaris
cccacgcgtccgtgatcttctaggtcggtgttgccagccgagcagccagcgggaccaggtcggcagtcgtcagcacgacttgcagcacagcaggtccacagtcagcctgtgcaggcagcaaggctggggaggggtgcaaggtaagttgcagattgcaggacagggaggaagcctgggaaagacagtagtcctgtgaagggagcggcgcagcacccccacgatttgacttaatgcctttggtaatggtggcaggcaatgcggacagagagggttgatcggtactgactgggctacatgcaagtatgctcatgagccttgcttgagtttgattcagcaccttcctcccaaagctttgttgacggcggcaggccgtgcataggtagcaatggatcgtattga

SEQ ID NO: 323 - DNA, 409 bp, Chlorella vulgaris
cccacgcgtccggcggggcccccgtaaaggaccgattcggttactggcgagtgcttagtcgctaccagtgtcaagatatcaagctcgtgtaccgctatcgttctggctgatgtagtgctatgagtggtgttttgctccgtgggcagcccaaaaagaattagggcaaatggagatttcgaagcgacctgttcaagtactgttcaagtattatctaatttctggcaagaaacgcagcttggacttgtgagtttgcccatgtctgtttccaagtgggcttgtgatgacatctttgcccgtgactggtgggcttcagcagtgggaaagcaacacaacatgaaatgctattcaagtgcgggttgtgtggcactccattggtatgctgctggttgccaagtggtgtttatgaact

SEQ ID NO: 324 - DNA, 400 bp, Chlorella vulgaris
gttcatcgatcacaggctgagctggtggctacggttctccacaggccctccgggcagtgctgagttgctgccctgttgccgtgtggttgtacagtagacaatccatagggtagcaggggtaaagatggcgacagccctccagaaaactcgcgccctacatctatacaggcacagcctgaaaaacatgctcagctgggctgtgaggagagagattttctatgaggaggctgagcgcattcgtggcgagttcgaggcaaacaaggccctcactgagccgattcagatagagcgcgcgctggagaagggggaggcaaagctgcgggagatgctgcaccccgacccttacatcgtgccctaccggccaggcggcagcatgtatgcccgcaaaccccccttcccc

SEQ ID NO: 325 - DNA, 397 bp, Chlorella vulgaris
ggccaccaggattatcaggatgggtcgccacaaggtgtctaagagttcggcgtacttcagccggttccaggtgaagtacaagcgcaggcgccagggcaagaccgactaccgcgcccgcctgaggctgtgcacccaggataagaacaagtacaacactcccaagtacaggctggtggtgcgcttcaccaacactgacgtggtgtgccaggtggcatacgccacgctctccggtgatgtcgtcgtcagcgcagcctacgcccatgaactgcccaactatgggctgaaggtgggcctgaccaactatgctgccgcctactgcaccggcctgctgctggcccgccgggtgctgaccaagttcggtctggccgagacctacgagggcaacaccggcagcccc

SEQ ID NO: 326 - DNA, 420 bp, Chlorella vulgaris
cccacgcgtccgctttgccatgcactgggtggaggtgaagcgtggtctggacctgaaggaccccggcagccaggactttgaccccgtgttccagggcaacaagctcaagccccatgaggttgggtaccccggcttcacaatctttgtgcccggcgacatggatgagctgaagctgaaggagattaagaacggccgcctggccatgcttgcctttgccggctttgtgatggcggcgcaggtgaccggcctcaacccgctggcagcgctggggcagcacctcgcagagtccatcaacaccaccatgttctccaaggccgtcgttgtgcccggccaggcgattacccccggctgcgctatcgcctcatctgtgaactacgagggcctcaccatcaccaccccctgcgtcttccagggcctgtg

SEQ ID NO: 327 - DNA, 349 bp, Chlorella vulgaris
  unsure (1)..(349): unsure at all n locations
gtgggacatctgcctggcgctcatgaagcgcggcctgctgactaagccgactcaccgcaacatcatccggctggcgccgcccctgatcatcaacgaggagcagctcaaggaggcggtgggcgtcatcaagcaagtctttgaggaggtggtaaccaagtgaggagggtgcctgctaacagaggaaatttgagggggacgggggacggaacgaaaggcagaagggctggtgggtggtgcggctgtcggcatggagtcgcttgacgctggccttgctagctgctgccctctgcanaggctgtgcacccagcatatanctgccctctgcttggccttggangaatggattaat

SEQ ID NO: 328 - DNA, 355 bp, Chlorella vulgaris
aaagaaaaatcacaaaaaagtgataaaaaaaattcagagtacatcaaaagagttccaaatgaagtacaaacacaaagcaccagggcaagaccgactacagcgcgcacctgaggctgtgcacccaggataagaacaagtacaacattcgcaagtacacgctggtggtgcgcttcaccaacactgacgtggtgtgccaggtggcatacgtcacgctctccggtgatgtcgtcttcagcgcagcctacgctcatgagctgggcaactattggctgaaggtgttccttgacacctatgcctgcccctactgcattggcatgctgctgtcccgccgggtgctgacaaacttcggtcgggc

SEQ ID NO: 329 - DNA, 406 bp, Chlorella vulgaris
cccacgcgtccggctgcgagtattggtgtgctaagtaaagcttgtcagcatgggcaagtgcggcaagggaactggaagctttggtctgcgtcacaccaagacgcacggcctctgccgtcgttgcggcaggcgctccttccacctgcagaagagcacctgcagctcttgcggctatcccgctgctaagatcaggaagtacaactggggcaagaaggccatccgcaggaagaccaccggcaccggccgcatggcgcacctcaagctggtgcacaggcgcttcaagaacggcttccgggaaggcactgaagccaagcccaaggcagttgctgcatgaagagcttgtcagcgacactagggacagcgcagctctgagacagtgcagctatgaatgtaaatttcgatgacg

SEQ ID NO: 330 - DNA, 379 bp, Chlorella vulgaris
  unsure (1)..(379): unsure at all n locations
cggacgcgtgggttcggtaggttccagctgcccgaacagctggccgccacgttcctggtgacagagggaccgtcatgcagattttcgtcaagaccctcacgggcaagactatcacccttgaggtggagtcttcggacactattgagaatgtgaaggctaagattcaggacaaggagggcatcccccctgaccagcagcgtctgatcttcgccggcaagcagctggaggacgggcgtaccctggccgactacaacatccagaaggagtccactctgcacctggtgctgcgcctgcgcggcggcatcatcgagccctccctgcagattctggcccgcaagtacaancaggacaagatgatctgccgcaagtgctatgcccg

SEQ ID NO: 331 - DNA, 396 bp, Chlorella vulgaris
cccacgcgtccgcaacaaccaaccgaccccaggcaaccatgatcgcactcgcggcaccccagacccgctgcttccagcgcagggccatggcccaccgggaggtgcccacggtacgggccaaggtgctctgccaggcacagcgggctcccaaggcggtccaggagaagctgacccctaaggagcaggtggccaggtccctggcagtcttggctgcgactggcaccctgttggtggcttaccccgccctggctgacttctgttcccaggccaggtccaactgcatggcatcatgcaacggtgccgtggcagggttttcgtgcaacgtatcccagcagacctacacctgcaagtgccagtagtacgccctttaagttgcacctgtggtgtgttgcccca

SEQ ID NO: 332 - DNA, 381 bp, Chlorella vulgaris
  unsure (1)..(381): unsure at all n locations
cggacgcgtgggggcggaagtgccgcaaggcacacttctcggcgccctccagcgtccgcaggtcgcttatgagcgctcccctctccggcgagctgcgcaacaagcacggggtgcgctctgtgcccatccgcaaagacgacgaggtgaccgtcgtccgcggtacctacaagggccgtgagggcaaggttgtgcaggtgtaccgcaagaagtgggtcatccatattgagcggatcacacgcgagaaggttaacggcgcaaccgtgaatgtgggtgtcgacccctccaaggttgtgatcaccaagctgaagatggacaatgacaggaagaacctccttgagcggaagaagggcggcaaggccganggcaagggcaagttcaccg

SEQ ID NO: 333 - DNA, 409 bp, Chlorella vulgaris
gttgtttataagcccaacagaccaacatgaagccgacggcagtttgcgctttgatggcgcttgcgattatggcgcttgcgggttggccgcttgcgcaaggccgcttgatgctgccgatcggtataactgccggacgtgcgaggcgcgcgctgcaacagagcggcggtagcatggcttcgacagttgtcgtgcctatcgacaccaagctgagcctttacaacatctccggcacctgggtcggcatcggtgaccagttcgacgcaagtgtgtgggccgcctactttgaggaaaacaagctacccaactgcggcgccgtggggaacttcacctacaagcactgggatgtgacactgcccgacaccctggcccttgctgttgatggcgagcaaggcattggcaacaatggcca

SEQ ID NO: 334 - DNA, 395 bp, Chlorella vulgaris
gtgtcggagcacagccggtaggaggcagcgccttttggccaagggtggtgcagtggccctggagtcaccagggaatctcccagtatctcaggcgcaggcgcatgcgagggacctaccctttgaaggccacgcgcacttcactgctaggacagcagctcggcactggcaggggtcttgtaggggtacggctggagaaatgcaactagaaagttggtccaagcgcctggcgcgatgctcccgggtgatggcgaaactagtggctagctcttcatttgtgcgagtagaaaacggatgccctgcgcccagcttgtcctcacatcacccatattggtagcacctggctatatatttgtgtgaccaaccactccttttgacaagggcttgggtccatgcat

SEQ ID NO: 335 - DNA, 389 bp, Chlorella vulgaris
cccacgcgtccgcaaagccgccagaatgcagaccaccttcgtgggcaccacccaggcgctgcgcgccaaggtctccacccaggccactcgtggctccaaggtagcaacctccatgcgccgcaccgtcaagtccaagaacgtgaagaccaccgacaccagccagtggtacggtcccgaccgccccaagttcctgggccccttctccgagggtgctgtgccttcctacctgaacggcgagttcgctggtgactacggctgggacaccgccggcctgtccgccgacgccgagaccttcaagcgctaccgccagattgaggtcatccatgcccgctgggccatgcttggcgccctgggctgcatcttgcccgaggtcctgcagaggtacagcg

SEQ ID NO: 336 - DNA, 412 bp, Chlorella vulgaris
caggatgggtcgccacaaggtgtctaagagttcggcgtacttcagccggttccaggtgaagtacaagcgcaggcgccagggcaagaccgactaccgcgcccgcctgaggctgtgcacccaggataagaacaagtacaacactcccaagtacaggctggtggtgcgcttcaccaacactgacgtggtgtgccaggtggcatacgccacgctctccggtgatgtcgtcgtcagcgcagcctacgcccatgaactgcccaactatgggctgaaggtgggcctgaccaactatgctgccgcctactgcaccggcctgctgctggcccgccgggtgctgaccaagttcggtctggccgagacctacgagggcaacaccggcagccccggcgaggactacaacgtggatgcctccgac

SEQ ID NO: 337 - DNA, 366 bp, Chlorella vulgaris
gctaggttgcttttgcatacctgcttgcccggtcgctatagccgtcaccagccgttgatcgctcgggcaaagtctgcactgacagcacaagacagtgctatataggaagggatggcccccaagggatccggctcgcaggcaagcacactagttgcccgaggcagttcagctagcaacgagaacaaggttgcagccgctcgccccacaccgactgggaccgtgagaagaaggacgcctgctcgcagcagtgcacagccgcgctctggctacttctacaccgatgacacggcactgatcaaactctcgccgacctcggtgattattatggcagtggccttcatcgtctttgttttcatactccacatc

SEQ ID NO: 338 - DNA, 253 bp, Chlorella vulgaris
gccacggcctcttgacatgagtgcagcatgcctgtgaggcagtcccgcttgtttcctcagtgtatgaggaaaggagggaagctccttcctgtgaatccgccaccgctgggccgtagctggtatgggcgggcggtggagtgtgcattgaccgagggtgcagtggtatgcggccacgagggtgtgtggggcggcggggcagcaacagctgttaggagtagcgagaagcctgaccccttgtaaccgcctcagcggc

SEQ ID NO: 339 - DNA, 420 bp, Chlorella vulgaris
catggcacccaagaagaaggttgcggcccctcctgccgcggtcaggaaggccgctcagccggccaagcccgtgaaccccctgtatgagaagaggccgaagaccttcggtatcggtggtgccctgccacccaagaccgaccttcaccgctttgtgaagtggcccaagtatgtgcgcatccagaggcagaagcgtgtgctcaaccagcgtctcaaggtgccccccgcactgaaccgcttcacccgcacgctggacaagaacatggccgagagcctgttcaagctgctgctcaagtaccgccccgaggacaaggcagccaagaagcagcggctgctggctgaggccgaggcccgtaccgccggcaaggaggtggagaagaagaagcccgtggtggtcaagtttgggctgaaccacatcaccac

SEQ ID NO: 340 - DNA, 414 bp, Chlorella vulgaris
gctctgctgggttctgctgtcccttgaagtctcttggtggccaggtaaaagtaccatcatgcagtcggccatgttcaccagcaccagggtggcgtctgccaggcccagcgtggccgtgaacgccaagaaggccgccgccaagaacgcaggcaccggcactcgtgtgggcggtgctggctacaggcagtacagcggcgacgctttgtggctgcccaacaccactcgccctgagtggctggacggctctctgcccggcgaccgcggcttcgatccactgggcctgtccaagcccgctgagtacctgcaggtcgacctggactccctggaccagaacaaggcccgtaacaaacccggcggcgttgtcggcaagttcacctccgttcccgacgttctgtccgaaggacccccggcccc

SEQ ID NO: 341 - DNA, 400 bp, Chlorella vulgaris
cgtcgacaacaggtccaaggttcacaagatgcagaccctctctgcccgtttcggcgtccgcgcccctgtctcccggggcacccgccaggtgacccgcgcctccgtggagtggtacggccccgaccgcgccaagttcctgggccccttcaccaaccccccttcctacctgaagggtgagttcgctggcgactacggctgggacacctctggcctgtccgccgatcccgagaccttctcccgctacagggaggttgaggtgatccatgcccggtgggccatgcttggcgcccttggctgcgtcgtgcccgagctgctggaccgcaacggcaccgtcaactttggcgagaacgccgtgtggttcaaggccggtgccgccatcttcggcgatgacgggctgaac

SEQ ID NO: 342 - DNA, 376 bp, Chlorella vulgaris
cccacgcgtccgcccacgcgtccggatagacaagccagttacatagtgtaagggttccgccgctgcctcacatggcgcctcctcagcaaaagcaaacaccccttggcgccgttatcgcacgcgtagctagggcttacactacagcagagccatacctcaagacggcgctgtactatggctacattccagccatccttcttatcggcgcaaggacaacagaaccacggccgagcatagcacagctggtgtcacccatgtgatcaggggctgccagggtagcccaagtttaattcacagtccgggcagtttggatgcgacagcggcgggcttcatctgctggcggcagcaggttgtgcatctgcggtttggccctgga

SEQ ID NO: 343 - DNA, 331 bp, Chlorella vulgaris
ctttgatcttgatttgagggcttgccttgtcgcgggagcattccggcttgggtgcgaacccttgcacaagctgccgcaaccagctatttcgccagttgaggatacaagaacagcaagtgcaaggcccagctgggcttgattggctctgctgaggaacgatgactcgaggactggcagccctggcgcgccgtgccgggcaagcaaggcagatcatggctgtgcggggcggtggtggcgggcctctggccaggccccagcctcccacacaggcgctcatggaggaagaccaactaatttgggaagaagggaatgctaaccccgaaccctgcct

SEQ ID NO: 344 - DNA, 383 bp, Chlorella vulgaris
cccccgtcgacaacaggtccaaggttcacaagatgcagaccctctctgcccgtttcggcgtccgcgcccctgtctcccggggcacccgccaggtgacccgcgcctccgtggagtggtacggccccgaccgcgccaagttcctgggccccttcaccaaccccccttcctacctgaagggtgagttcgctggcgactacggctgggacacctctggcctgtccgccgatcccgagaccttctcccgctacagggaggttgaggtgatccatgcccggtgggccatgcttggcgcccttggctgcgtcgtgcccgagctgctggaccgcaacggcaccgtcaactttggcgagaacgccgtgtggttcaaggccggtgccgccatc

SEQ ID NO: 345 - DNA, 408 bp, Chlorella vulgaris
cacaagcgctgcatcccgttcctgcgctacaatggtggcgtgggccgcaccagccaggctaagaatgagggcaacaagatcggccagggccggtggcccaagaagagctgcgagttcctgctgggcctgctcaaaaatgccgagagcaatgcagaggtgaagggcctggacacggacgccctgtacgtgtctcacatccaggtcaacaaggcgcagaaggggcgccgcaggacctaccgcgcacacggccgcatcaacccctacatgtccagcccctgccacattgagctcatcctgaccgagaaggaccaggcagtcaaggccgagctggaggagaagagcgagcgcaagctgagccggcgcgaggccgccaagaagctgcgcagcggcaacacctccaagagcgct

SEQ ID NO: 346 - DNA, 412 bp, Chlorella vulgaris
aaaatatgaaaaaatctcattaattatgctccaaaatttgaaagcataaccaccgaatgttcacaaaacttgatgcaacaagttgccactgaccacttcggcctggcagacatcgaacatcgagtggtttgacgtgggggaggccgactgacagtgtcagaagtatggagaccaggcacgtgtccatatgcctggtttgctccaccgaacctgctatgtatgggcattcattttaacaggccagccgcggtaacacctgggcatcccgctctttaacccctgtgcaagccactccgatttgaccgtgggggaacacttgcagccggccgacacttatcgccatcgcgaggtttggcggctccagaaggacctgggggtcaccctgagcaaggcggcattagacggcccgctt

SEQ ID NO: 347 - DNA, 397 bp, Chlorella vulgaris
gacagtagccaacttggttcgtcagatgaattacgagtacaaggccaacctggttggggcgatgattgtggctgggtgggatgcgcatgagggcgggcaggtgtggggttgccccataggcggcacgctggttcaggagcggtggactactgacggttctggcagcaccttcatctgggggtatttggagtcggaatacagggatggcatgagtcgcgaggaggcggaggcgtacgttgccgaggcgctggccctggccatgtcgcgggacggctcctccggcggcgtcatccgcttagtcaccgtcaacaaggacggcgcacacaggaggttgataaagccacaggagcaccccactttctgggatgagctgccggagcctgccggcatggtggtg

SEQ ID NO: 348 - DNA, 420 bp, Chlorella vulgaris
gcggggcccaaagaaacatctgaagagattgaatgccccgaagcactggatgctcgacaagcttgggggcatctttgcccccaagccgagcgcgggcccccacaagacccgggagtgcttgccgctcatcctgctgctgaggaacaggctcaagtacgctctgacgggcaaggaggtgacgagcatcctcatgcagcgcctggtagaggttgaccgcaaggtgcgcactgacaagacctaccccgtgggcttcatggacgtggtcaccatccccaagaccgacgagcacttccgcctggtctacgactgcaagggccgctttgtggtgcaccgcatcagcaaggaggaggcggcgtacaagctgtgcaaggtccgccgcgtgcagtttggcaagggcggcgtgccctacattgccaccca

SEQ ID NO: 349 - DNA, 335 bp, Chlorella vulgaris
cgcgtccaacggggcccagagaaacatctgaagagattgaatgccccgaagcactggatgctcgacaagcttgggggcatctttgcccccaagccgagcgcgggcccccacatgacccgggagtgcttgccgctcatcctgctgctgaggaacaggctcaactacgctctgacgggcaaggaggtgacgagcatcctcatgcagcgcctggtacaggttgaccgcaaggtgcgcactgacaagacctaccccgtgggcttcacggacgtggtcatcatccgcaacaccgacgagcacttccgcctggtctaccactgcaagggccgctttgtggt

SEQ ID NO: 350 - DNA, 375 bp, Chlorella vulgaris
  unsure (1)..(375): unsure at all n locations
gttaccaacgaggagtccctgcggcaggcactcctgggttgctctggagccatatttgccgctgccgggaagggcaaacaggcggtgcaggacgtggacttcgagggtgtanggaacgtggcacaagctgctaaggatctgggcggcttccagcgggtagtgctggtgtcatcaggcctggtaaccccggcccgccgcttccacccaatccgcatcatgctcaacagcattgtggcccgcggccagctggatgcaaagtggaaaggggaggagcttctccgcagaagcggagtcccatataccatcatacgccctggtcggcttgtcaatggcgcagctgggcaagcaaagcttgtagcagatcaaggtgacaag

SEQ ID NO: 351 - DNA, 402 bp, Chlorella vulgaris
cccacgcgtccgcccacgcgtccgcccacgcgtccggcgcaggtctgccaccaaggtgcagacgcgctcaattgtgggcgtgtccctggaggtgattcagaagaagaaggcagagaagcccgagcagcgcaaggcctcacgcgaggcggccctccgtgagatcaaggagcgtgccaagaaggcaaagcaggacaaggctacccagaaggccgccgcgaaggccgctgcccccaaggcctccaagaatgtgccccgtggcgctggcaaggcaggcgccaagtccactgggcgctgagctttgcggctagcgggctgtgggagcgagtggtgcgggcggcagcggcagcgcatggcatcggacacacgagtaggaaatagcagcgcatgtaactgccgctacgt

SEQ ID NO: 352 - DNA, 401 bp, Chlorella vulgaris
gcttcagccagcctttgcaaaggttcctcgaagtctccacaatggccgccgctatgtgccagacctctgttgcccgggccttcgcccctaaggtggctgcccagaagcgccagcgcgctgttgccgcccaggcctatgttggcaactggctccccggcagcgaccgccccgcctacctggagaagctccctggtgcctacggctttgaccccctgggcctgggcactgagcccaagagcctggagcgctttgtggaggctgaggtgattaacggccgctgggccatgctgggcgttgccggcatgctcggcgtggaggccctgggctacggcgactggtacagcgcacccctctgggccgtgactggcggcaaggcgacctactttggcgcggagctgccc

SEQ ID NO: 353 - DNA, 409 bp, Chlorella vulgaris
caagcgaacaaccatggcgccaaaggagcagaagtccaaggaggccaaggccatggctgcggccaatgccagcaagggcaagaagaagaagtggtcaaagggcaagatgaaggagaaggtcaacaatatggtcaagttcgacaaggccacatatgagaagctgttgacagaggtgcccaagtacaagatgatcactccctctgtgctctctgacaggctcaggatcaacggcagccttgcccgtgccgccatcaaggagctccttggccagggtctcatcaaggttgtggccaaaagcgcaagccaggagatctacactcgagccaccgctgctgcatgattgactgaatgtttgaaggggcagctgtgttggaaggcttggcagatcccgatgtaaatgcagaagccc

SEQ ID NO: 354 - DNA, 363 bp, Chlorella vulgaris
cccacgcgtccgcatcgggtaaccagacccataggctacaggcagccgcgcggtcaatgaggggaatctaacaacgggaagctacatcatgtgggctcaggagaaacaaacgcgtgtccgacggcaatatgggtggtatcgacaagattgtggaccccttcagtaggaaggactggtatgatatcaaagtcatcatcgccttcatacaccccaatatgcgcaagattctggtcaccattacccatggtaccatcatcgccccacatggtcagagtcgcagtagtgtcgaggtgtccctagccgacctgcagatctaatgacgcatgatgcctagcccaacatcatgcttcacattgtggacgt

SEQ ID NO: 355 - DNA, 381 bp, Chlorella vulgaris
cggacgcgtgggcggacgcgtgggttgggctggttgcagggcgcgttgacaaaatggtgaacgtgccgaagaccaagcgtgccttctgcgctggcaaggagtgccgcaagcaccagatgcacaaggtgacgcagtacaagaccggcaaggccagcctctacgcccagggaaagaggcgttacgaccgcaagcagtcgggttatggtggtcagaccaagcctgtgttccacaagaaggctaagaccaccaagaagatcgtgctgcgcctgcagtgccaggtctgcaaggccacccacatgcacgccatcaagcgctgcaagcatttcgagatcggtggtgacaagaagaacaagtctgccatgtactaagcgcagcaacagc

SEQ ID NO: 356 - DNA, 416 bp, Chlorella vulgaris
ggagaagcggaagcacaagctcaagcgccttgtagcttctcccaactcctatttcatggacgtcaagtgccaggggtgcttcaccatcacgaccgtgttcagccactcccagacggtggtggtgtgccccagctgcaacaccgtgctgtgcgtgcccaccggcggcaaggcccgcctcacagagggctgctccttccgcatgaagggcgattagtcaggggaggcgctacgctggcatgtggtctcaagaaagtgcgccgccgcggcttgaggactcttgccagcgggacagcacggcctatcaggacaggaacaggaagggagcgaagtagatttgcaaagcatggaaagatggttgttatggattgggttgcagcgccccgcccagtcaggatactcttcagccacccctgtta

SEQ ID NO: 357 - DNA, 386 bp, Chlorella vulgaris
cacgcgtccgcatcggaagcgcatggcacccgcttgagacatccaaggtggccacatgcggctgggacggactcatcaagtactgggactagctgcaggggccggcgctgggtaggtcacagggctgtgcaaacggctggtggcatgtagggcagcaagtacggctgggatggccttgtcacacttagggacgaagtgtgcttcgaaccttgatttactgagggtgatgggaccaaggcagacagatgcagggaggttgctttttgagactgaggctgtcacacttgagggatgcagagttgatggcgtccgtcagggcatcggaataggctaccacaccgggtagcaagtactggatggctggcatatgatgtacaccctgttgt

SEQ ID NO: 358 - DNA, 397 bp, Chlorella vulgaris
cctttcctgttctctgccaaggagctgcaggccaagggcagcgctgacgggtttggcggcgagttcactgtgccgtcctaccgcggcgcaaccttcctggaccctaaaggccgcggcgctgccaccggctacgacactgcagtggcactgcccgctgctggcgatgctgaagagctggagaaggagaacgcaaagaagaccactgccctcaaaggtcaggcggtgttctccattgccaaggttgacactgtcaccggcgagatttctggtctgttcgagtctgtgcacccgtctgacactgacctgagtgccaaggcccccaaggatgtgaagatcaccggcttgtggtatgcccagctcaactgattgtccggctccctgagctcatccaagacta

SEQ ID NO: 359 - DNA, 376 bp, Chlorella vulgaris
acggtgtgcacgctgcgagtattggtgtgctaagtaaagcttgtcagcatgggcaagtgcggcaagggaactggaagctttggtctgcgtcacaccaagacgcacggactctgccgtcgttgcggcaggcgctccttccacctgcagaatatcacctgcagctcttgcggctatcccgctgctaagatcaggaagtacaactggggcaagaaggccatccgcaggaagaccaccggtaccggccgcatggcgcacctcaagctggtgcacaagcgcttcaagaacggcttccgggagggcactgaggccaagcccaaggcagttgctgcatgaagagcttgtcagcgacactaaggacagcgcaactctgagacag

SEQ ID NO: 360 - DNA, 428 bp, Chlorella vulgaris
ccggggacgcgtccgaaccagaccgctcgcaagctccggaggaggaatgcccgcgccgagaaggccaagaaggtgttcccccgccccaccgcgggcgcgctgaggcccatcgtgcacggccagaccgtcaagtataacatgaagaagcgcgcgggccgcggcttcacgctggaggagctcaaggaggctggcattccctccaagcttgcccccaccattggcattgcagtggaccaccgccgcaagaacaggtcccttgaggggcttcaggagaatgtgaaccgcctgaaggcctacaaggccaacctggtggtgttcccgcgccgcgccggcaagcccaaggccggcgatgccagcgcggaggagctcaaggcggtcgcgcagctcagcggcccggtgctgcccgttacacgcgctgcgcccgctct

SEQ ID NO: 361 - DNA, 383 bp, Chlorella vulgaris
ccacccacgcgtccgcacacgcgtccgcggacgcgtgggccgaggccactgtggccgatgtcaaggctgccatcgaggccagccagggcatcccctgcgatgcgcagcgtgtgatgttctctggtcgccagctggaggaggaggcctccctggccgcctgcggcgtgtctgacgacagccagctgtacatcctgatgcgcctgctgggtggtgccaagaagcgcaagaagaagacctacaccaagcccaagaagcagaagcacaagcacaagaagatcaagctcagggtgctcaagttctacaaggtagacgacagcggcaaggtgcagcgcctgcgcaaggtttgcccccagtgcggccccggcatcttcatggccacgcac

SEQ ID NO: 362 - DNA, 383 bp, Chlorella vulgaris
tgaaccctttttgggccggacccgcattgtagcactgtggcttggcagctgtgtatcactcctggggtgttccttagttacggtggggatatgcgggtgcggcgaatcccttgttggaagcggtttcgctgtgttgcgctgctcttggcatgcgtcgcggttgcggagtagcagccgcgctgtcaagcatgctgatcctggttggtggagtggacgttgctgatttgatgtacctcacctgaggcgtgtacatgctgcgcacgctgcgcctgtgccgcgtgcgctggctcggtgctctgcagcctgcagattttactggcatcggcgatttaatgtagcaacagtcacttgttgagtgtggtgacgtggggtgtgtaacatgc

SEQ ID NO: 363 - DNA, 394 bp, Chlorella vulgaris
aggacgcgtgggcggacgcgtgggctcaaggccgggggccgcaacaagcgggtccacaggaccgcccccaagagcgacaacccctatctcaagctgctcgtgaagctgtaccggttcctggtgcgccggaccgactctgacttcaacaaggtcgtcctcaagcgcctcttcatgtccaagaccaacaggccgcccctgtccctctccaagcttgccaagttcatggccggcaaggaggacaagattgccgtgcttgtcggcaccgtcaccgacgatgtgcgcctgtacgaggtgcccaagctgcgtgttgcggcgctgcgtgtgaccgagacggcccgcgcccgcatcctcaaggcgggcggcgaaatcctgacctttgaccagctggcgctgc

SEQ ID NO: 364 - DNA, 445 bp, Chlorella vulgaris
attcgcgcggtccacccacgcgaccggacgcatgtgcgccgaggcgatcgtcaaggcgtctgagggcggcaagaagatggctggcgaggctgcgctgcgggagtacttggacaagtgggaccgcaagtactgggccacctacaaggtgctggacatcctgcagaaggtcttcttcaggtccaacccggcgcgtgaggcatttgtggagatgtgcaagtcggactacgtgcagcgcatgaccttcgactcatacctctacaagacagtggtgccaggcacacctgtggaggatgtgaagctgctggtggagactgtgagcagcctgctacgggccaacgcgctgcgcacgggcaagggcatcaacgtcagctttggcaacaagtccaacgaggagaagctcatggggtcataaggcccaggtcgcctgaaggcccctagggcctgg

SEQ ID NO: 365 - DNA, 405 bp, Chlorella vulgaris
cgggtccagcacgcgtccggagcagacacaccatgcaggtgcaagccctcttcaagaagcttggcggcggtgcccccgctaaggcagccaagaaggccgccggtgcagccaagaaggccgttggcaacgccaagaaggtcgcctctggcaccaccaagggtggctggctgggcactgacagcaacaacatcgacctggacaggtggtacggccctgaccgcgccctgtacctgcccggtggcctgctggaccgctctgaggtgcccagctacctgaacggcagcctgcccggcgactatggctacgacccccttggtctgggcaaggatggcggcctggagaagtaccgcgccaacgagctgctgcacgcccgctgggccatgcttgccgctgctggcgccatca

SEQ ID NO: 366 - DNA, 373 bp, Chlorella vulgaris
cccacgcgtccgcccacgcgtccgcccacgcgtccgatccgaccagcgtgttctacgctcgtgatgctataagacaccggggatggaaaggccgactgggagcagccacatcagcttcacgctggcagccatcactggtgcagcgggggtgtccggctatgccaagtcttctagtgttccaagtctggtggcagggctcggcattgctgccacctttgcagctggaggagcactgatcaactctggaaggagcgacctgggccacccaaccaacctggttgccagcctggcgcttgtagcagccatgactcctagagccatccggaccagaaagttgtggccagccggtgcgatggcactgctaaggtgggcc

SEQ ID NO: 367 - DNA, 411 bp, Chlorella vulgaris
  unsure (1)..(411): unsure at all n locations
gtgagagcctgaccctcatgcctccttttcaccatggcctctgcgttgattgccaagcccactgtggcccgcgtcttccagagccgtgcgtccaccgtgcgagccaggagcagcgtgaatgttgcaaccgctgagaggcagctgtggctccccggcgcggacgcccctgcccatctgaagggtgacctgnccggcgacaggggctttgatcctcttaaccttgggaccaaccccgagcgcctcgcatggtacgccgagggtgagaggatcaacggccgctgggccatggctgccatggccggtatcctggcccaggacctgctgggcaagggcaactggttcgaggccggctcgcaggagtactggctgcccaacaatgcgctgctggccatcgagttcctggtgctgggc

SEQ ID NO: 368 - DNA, 421 bp, Chlorella vulgaris
gattggctggggcgtggccgcgctcatcacccccaccgtgctgctggtcaccggcgtgatcttcttctccctggtgctcttcagcggcccgctgacccccacgctggccgcggccggcctgacgcccctgtacgccgccgtgctggtgggcgccgcccagaacatcttctccaaggcctccaagtactcgctcttcgacccctgcaaggagatggcatacatccctctggacagcgagaccaagaccaagggcaaggccgcgatcgacgtgatctgcaacccgctgggcaagtccggcggcgccttcatccagcagatcatgatcatcggctttggctcgctggccgcctccaccccctacctgtgagccatcctgttcctcaccgtgggcacctggatcctggcagccaacgacctcagc

SEQ ID NO: 369 - DNA, 129 bp, Chlorella vulgaris
tgggtccccgtctcgcaatagttccagggcaatcactatgcaggcaaccatgatgaagaccttcggcgccagcctgcgcaaggctgtgcccacccagggcaagggcacccgccaggtgacccgcgcctc

SEQ ID NO: 370 - DNA, 379 bp, Chlorella vulgaris
cacgcgtccgcacacacgtccgcggacgcgtgggcggacgcgtgggcggacgcgtgggcggtccgaaacttgataggcgccagcttgtctacttgggtgctacggtttgggcctgcggctccacttgctcgccccaagcttcccacgcagactagcagcaatgcgcggtcttacgtcccttgccaggcgtatcacgcgcgctcccggcaggcagctgatgcagaggcggggcatggctgctgatcctcatggagaggtgaagttgaacgcctgggaggctcccttggagatccccaagtggaaggaggagcacatcgtgttccttgttctgggcggctggggcgtgggcatctggggcgccatgaaagcatttggtggc

SEQ ID NO: 371 - DNA, 359 bp, Chlorella vulgaris
acgcgtccacctaagcgtcggcccacgcgtccgattctctatctgttcgatcgtcgtttgattaattcaaagcaaacaaggtttgcccaattagcattgccacaaccataaccgccaaagcacccaccattgccgcagtggctagtggggctgcagaagccacagcggcgaagctggcagatgataagttacatccatcgagagccggggaggatcgtggggttaggttcggaaggcccaagctagccaagctagtggcgcagacggtagagatcatcaatacgaagaagtccccatgaggtccgatgtagacagccattaacaaaaacaaagcgtggtgccggccgtattaccagggg

SEQ ID NO: 372 - DNA, 384 bp, Chlorella vulgaris
acggatccctgggtcttgcaatctctgtgactgacgaccggacttacctcacttttggaacatctgtacgatgcatcatgcagttgttttggagtcagaatgtttaggggcaggcatgtatacgatgctttctgcctgtatgtgtgcttgccgtgcagtatattatcgagccgctcaccgttattcatacctgatatgcaagtcctcctgatgtaagttgctacactgtgtataaagtgtgacagaactgttagcctcattctgacgtaccgagctgtaactatgacttgctggatttgagatcgttaccatgaaatcttttgagacgcgtcctcatgcttatgaactacccctgtatgcagcgttttgtgatggagtctggcg

SEQ ID NO: 373 - DNA, 364 bp, Chlorella vulgaris
cccacacgtccggccctcaacgtctggcggcgctgtctctggttggacttgtgtctagccactaagcaggggtcctggctgctgccatgccatcaaacgcagtgttacagcttgccagcattggcagcagaggccttaacaaaccggcccctgcgcataaggcgtcagtgtgtcgcgttcgctttgtgcctaatgccactgcacaggtcgcagctgacagcaagggggaacagaagaagctatggggcggcaggtttactggggccacggaccccctgatggagaagttcaacgagagcctgccctttgacaagcgcatgtgagcacaggacatcacgggcaaccaggcgtatgccacagccct

SEQ ID NO: 374 - DNA, 382 bp, Chlorella vulgaris
  unsure (1)..(382): unsure at all n locations
ggggccagccacgcgtccggagccaccaaagccgccagaatgcagaccaccttcgtgggcaccacccaggcgctgcgcgccaaggtctccacccaggccactcgtggctccaaggtagcaacctccatgcgccgcaccgtcaagtccaagaacgtgaagaccaccgacaccagccagtggtacggtcccgaccgccccaagttcctgggccccttctccgagggtgctgtgccttcctacctgaacggcgagttcgctggtgactacggctgggacaccgccggcctgtccgccgaccccgagaccttcaagcgctaccgccagattgaggtcatccatgcncgctgggccatgcttggcgccctgggctgcatcttgcccg

SEQ ID NO: 375 - DNA, 290 bp, Chlorella vulgaris
cacgcgtacgcacacgcgttcggccacgccttcgccggttggaaaggccttgccttcggaagccaaaattgcgttcaaaaggctttaaccgaactaatggaaaaactttaaaaaaccccgggggccccttcaaaaaggaccggttgaatcccaaccggaaaaccttggccaattacggcttgcgaaaaagccccaacctcggccttttcaaaatggtgcggtcaaacctgcccccaagggcccggtcccggctaaccctgaacaaaaaggacccaaaccgcctttttaag

SEQ ID NO: 376 - DNA, 428 bp, Chlorella vulgaris
tcctagcacaggtcggcgttccttcccctgtgactggaagtcccgcatccttcccctgtgctgaagtgatcaacgcgcaatggcgaagcacttcaccgtccttgcccttctgttcgttgttgggatagcagccgcacagagcgactgcccaaacggcttcacggggccagagtgcgctttgtgcaccagcgatgctggctgtgctgacttgacaggctacgctgacgccacctgcaacacagacctgagcttcagcgctaactcagagctcaagaacttccactgcaccatcgagagcagcaccttctcggccttcatcgtgcccgactccctcctcatccagtgctacccccagggcatgaacatgaccatggactccgtggcggacgcgcccgcgggggcccttctgcacctcagcatgaccctgc

SEQ ID NO: 377 - DNA, 389 bp, Chlorella vulgaris
cccacgcgtccgggaagcccagcagcgtcccgaggcgctggtgttccttgttgaccgcttgcgtgcggagctggataaggagggtataaggtacaccgacctgtcggggcgtcccaagcacctctatggtgtctggcaaaagctggtgaagaagagctacaccctggacaagatatgcgatgttcgggggctgcgcatcattgtgaacactaaggaggagtgctacagagcgcagcgtattgtggagcgattgtggtctcccgtgggtcgcagcaaggactacatccggaataagaagcccaacggctatcagagcctgcacacggtagtgagggccgatgactggcatgaactggacgtgcaaatacggacgtttacgatgcactaca

SEQ ID NO: 378 - DNA, 404 bp, Chlorella vulgaris
  unsure (1)..(404): unsure at all n locations
ccacccacgcgtacgcacacgcgtccggtcgccaaggctgccggtgtgtccgtcgcctccctggctctggccctgtccgccaatgctgccaccatcaagatgggcgctgacaacggtgctctggtgtttgagcccgccaatgtgactgtgtctgccggcgaggagatcacctgggtgaacaacgctggcttccctcacaacatcattttcgacgaggatgaggtcncgtctggtgttgatgccgatgccatctccaatgaggacacctttaacgcccccggcgagaagtacagcctcaagctgtccacccccggcacttacggctactactgcgctcccatcagggcgctggcatggttggcaagatcaccgtccagtaatctgccggcacagcacagccagct

SEQ ID NO: 379 - DNA, 373 bp, Chlorella vulgaris
cccatctccaagaagaggaagttcgtgcaagacggcgtgttttacgctgagctcaacgagctgctcaccagggagctggcagccgatggttactctggtgtggaggtccgtgtgacacccatgcgcacggaaatcatcatccgtgccacccgcacacagaacgtgctgggggtcaagggacgccgcatccgcgagctgaccagcgtggtgcagaagcgcttcaagttccctgagggctcagtggagctgtatgctgagaaggtggccaaccgcggcctctgtgccgtggcccaggcagagtccctgcgctacaagcttttgggaggcctggccgtgcgcaaggcctgctatggtgtgctgcgttttgtgatgg

SEQ ID NO: 380 - DNA, 397 bp, Chlorella vulgaris
  unsure (1)..(397): unsure at all n locations
agtcaggccagaagggttccatggatcgcgccaccgaggctgccagagagggaaactcccaatactttcaaggaatcccaaaaaaaggctttacacaactagtccagaaacaagacgaatacgggcgaacaaccctaaatgcaactgccaacaacggcagcccggcaccgggacaatttcttggttaccaacggggcggctggcacccgtgaacaaccgccgacgaaaagggtgggccccctctgatgagtgcggcaagtgcagggcatgaggatgtggtgaaactgctcctctccctgngtgctgacctacaaatggccaacaaccagggccgtaccagcctacactacgcagcaagcaaagggacgccaactatggtgagacttctgctacaaaa

SEQ ID NO: 381 - DNA, 381 bp, Chlorella vulgaris
gtgcgccggggctgataggctccagaccggcatgcgcggcgccttcggcaagccctttggcgtggctgcccgcgtcggcatcggccagatcctgctctccatccgctgcagggagcagcacgcagtggtggctgaggaggctctgcgccgtgccaagttcaagttccccggccgccagaagatcgtggctagcaggaactggggcttcaccgactacctgcgcgacgactacctggagtggaagcgcgagggccgcctggtgaacgatggcgtgaacgtcaagctgctgggctgccacggccccctggagaagcgcgagtctgcgcacatcttccccacgcccgcccgcctctaccggacccccgtgcacggctctgacga

SEQ ID NO: 382 - DNA, 291 bp, Chlorella vulgaris
gcagacgacgtttgtaggcccatctgtagcggcagccaggcacgatggtgcagattggcaagaaggctgctagcggccctaagaagggcaagaaggccctgaccttcaccatcgactgctccaagcctgtggaggacaagattatggagattgcctccttcgagaagttcctccttgacaagatcaaggttgagggcaagacaggcatcctgggtgacaacgtcaaggttgtgcgcgagaagaccaagatcacggtgaccagcgagattgccatgagcaagcgctacctca

SEQ ID NO: 383 - DNA, 386 bp, Chlorella vulgaris
cacacgcgtccgtgcaggcaaccatgatgaagaccttcggcgccagcctgcgcaaggctgtgcccacccagggcaagggcacccgccaggtgacccgcgcctccgtggagtggtacggccctgacagggccaagttcctgggccccttctctgagggctccacccccagctacctgaagggcgagttcgccggcgactacggctgggacactgctggtctgtctgccgatccccaaaccttcgctgcctaccgcgaggttgaggtcatccatgcccgctgggccatgcttggcgccctgggctgcctgacccccgagctgctgcagaacgccggcgtggccagcttcggcgacgctgctgtgtggttcaaggctggtgcctccatc

SEQ ID NO: 384 - DNA, 430 bp, Chlorella vulgaris
cacacgcgtccggcgccaaaggagcagaagtccaaggaggccaaggccatggctgcggccaatgccagcaagggcaagaagaagaagtggtcaaagggcaagatgaaggagaaggtcaacaatatggtcaagttcgacaaggccacatatgagaagctgttgacagaggtgcccaagtacaagatgatcactccctctgtgctctctgacaggctcaggatcaacggcagccttgcccgtgccgccatcaaggagctccttggccagggtctcatcaaggttgtggccaaaagcgcaagccaggagatctacactcgagccaccgctgctgcatgattgactgaatgtttgaaggggcagctgtgttggaaggcttggcagatcccgatgtaaatgcagaagcccaaaaaaaaaaaaaaaaggcggccgc

SEQ ID NO: 385 - DNA, 392 bp, Chlorella vulgaris
acggacgcgtgggggaagatcattacaaggcgcttgcggcccagaagtgagggacttgttggctgctggttagagcgcctgtctctgcaaggtctgcttacggtggagcggcatggaatgttcagggtcagcttgggagtctgggctagaaagaggtggatagaggccgcagctgcagaggggcgccccaaccgccagctagagcgtacatatggtaccttactttgtgttacttgagccagggcgtaccctgtcgctgagcggcttggccgtgtggtcctggctcacgatattgtttgctttggctggtaagatttgatgctgtcatgagcattctcttaggtgtagaagtgtaaagcgcaccactgcgccactgtactgtttccatcgtg

SEQ ID NO: 386 - DNA, 378 bp, Chlorella vulgaris
  unsure (1)..(378): unsure at all n locations
agtttctacccaggcccactcccccaggcagaaacaagatggtggctctccagattctcgcagcgactgccaanggcaccgtcaagggtaccgttaagggtaccgcaaagcaagcagcgaagaccgtgaagaatgcggccatcaagaccgcaaagaaggtcgcccccaagaagggtggcgtggagtggtacagccccaacaggcccctgttcctgggcccctacagccccgagcccccgagccacctgaagggtgagttcgctggcgactacggctgggacacctccggcctgtccgccgatcccgagaccttctcccgctacagggagattgaggtgatccatgcccgctgggccatgcttggcgcgctgggctgcg

SEQ ID NO: 387 - DNA, 391 bp, Chlorella vulgaris
agcaatgcagctatcgccaacagctattatgtggcgggcattaacagggtcggcacggagaccttcccaaatgcgttcaccagcggggatggcaaggccgcccacaaggactttggccccttctacggcagcagctacgtggccgcgcctgacgctagccgcaccccctcgcttgctcgcaacaaggagggcctgctggtcgccgacctggacctcaacctgtgccagcaggtgcgggacaagtggggattccagatgacagcgcgatatgagatgtatgcggacctactggcacgctacactgcgctggattacaagccccaggtcatcaaggacccctccctcaagtaaaatactcaggatgctagacaagctagaggcttcacaggat

SEQ ID NO: 388 - DNA, 333 bp, Chlorella vulgaris
cacacgcgtccgggagactgtgtagtgtcgttgctcagtgtcattctcaacagccagtctccagccttggatgctcggcctaggcattggctccggtccaccttccggggaccagggctgtcagggaccagtccaaggcttgtgaaagcggcatatcaaggcatcatgtgcatcaaggcacttttcccagcacgcgggctgatcttgttagtggaaggccaaaggagaagcgcagtcgcagtatggactccaggagttgcgattgtggcagctgaggaagtcaagactgttggctggaatccttgggaatgccgtggggcagctatatacggg

SEQ ID NO: 389 - DNA, 374 bp, Chlorella vulgaris
tctacttctctcgcctgctggaggccaagcgtgtgcgttgagctcagggcagcgtttgggaagggtaaggtaccaggcccccgctggcgcgatgccagcgcagtggcagagtggcaggggcttgtggagggcaggggcgaaagtgtaggttaagggtgtgccttcgtgtggttggcttggggctgtcatgtgtatgagggcttttgttatggtatgagcgccctttgagggcatagccaagttaggtttctggctcaccagcaaaaggctgttatcaaacctctgtgtacgcttgccaccatttccgcctctccaataaaaactggtcacaaaggcgatcatgtgcttggatggcgacccttgcttatggcact

SEQ ID NO: 390 - DNA, 393 bp, Chlorella vulgaris
  unsure (1)..(393): unsure at all n locations
cacacgcgtccggccgtgccccagtctaggtgtccctgtctggctctgcacccggggcaacctgctaaacctatagcacaaggccggcgggctcttatcttccttggtgcaagcatggcagcagcacgggtgcagcagctgttgagcaagaccaaggcggccattgagcccgcataccaggcggcaagaggccaggttgtcaagacgtatgagtcacaaatggccaagggcgcagaatacgttgtcaaggacccagcagcagcagacaagcttctgaagcagtggttttacacacagctttctcggatacccactaccattgaggcaagcaaagctgagtataacactctgcgtgggaggctggcanattacaaggagctgcctacaactgag

SEQ ID NO: 391 - DNA, 403 bp, Chlorella vulgaris
gcagccgattgactaggcgctggcggagcgttgtcgtggagcagcacagcaaggagcgattgtgccctgccacacagctagtgctccttgaagtggctggtgacttactggccctggtcggttatgcaattgggaggtcgactgtatcagatggcatgtcactcggcatgcctaagtgtgactgttggatgtcgtgggttgttctaaacgccactgccccaacaggcgagtgtcctgtctccgtacgtgtgtggcctgccacacacctcgcaaacgtctcgttgcgttcgttgggggtcccaggtagaggggcagtatacctgtgaactgactagattgttgcctccagattcatagtgcacatgtagggtacgcctggtatctattttgtcaggacgagttc

SEQ ID NO: 392 - DNA, 414 bp, Chlorella vulgaris
cccacgcgtccgggagaatgtcaccctgggccctgccaccagggagggtgagctggtgtggggtgtgtgccacatcttcgcgtccttcaatgacacctttgtgcacgtgactgacctgtccggcaaggagaccctggtgcgcgtgactggcggcatgaaggtcaaggccgaccgtgacgagtcctccccctacgctgccatgcttgccgcccaggacgtggccgctcgctgcaaggagctgggtgtgaacgctctgcacatcaagctgcgcgccactggcggcaaccgcaccaagacccccggcccaggcgcccagtccgccctgcgtgcgctggcccgctctggcctcaagattggccgtatcgaggatgtgacccccatccccagcgactctacccgccgcaagggtggtcg

SEQ ID NO: 393 - DNA, 383 bp, Chlorella vulgaris
agtgattagtcgtgccagcaagatcatggccaagtgcgtgcgcacgcgccaggaaacgcagcccgacgggctgaaccaaagcgcgcaggccagcgtgggcatctaaggggatctaccaaagggttttgaggggtcttggggtcgcctgacagggtcaaagcgtgcaggcaccacgggcgttggacgggggacagaagaccggggtgtgtgaggcggaacttgggcggaggctgtgaagtagccagggtaggtgcctatgctgttgttggtgtttgggggtggcttaaggtgcccttggtgacagaccgagggcgcagctataagggtgaggagtgtggggaggtggggcgtcttggtgagagcttgtggcatccctgcattgc

SEQ ID NO: 394 - DNA, 391 bp, Chlorella vulgaris
ggcgcgttgacaaaatggtgaacgtgccgaagaccaagcgtgccttctgcgctggcaatgagtgccgcaagcaccatatgcacaaggtgacgcagtacaagaccggcaaggccagcctctacgcccagggaaagaggcgttacgaccgcaagcagtcgggttatggtggtcagaccaagcctgtgttccacaagaaggctaagaccaccaagaagatcgtgctgcgcctgcagtgccaggtctgcaaggccacccacatgcacgccatcaaacgctgcaagcatttcgagatcggtggtgacaagaagaacaagtctgccatgtactaagcgcagcaacagcaccagcttggttgagactagcatcatataggatgtaacttctctctcag

SEQ ID NO: 395 - DNA, 346 bp, Chlorella vulgaris
agcggccctccctgcagcgttggattaaggctgtgcaaggatggggtcgctcgttgccaaggagaactttacgcatatcctgcgtgtgctcaacatcaacgttgatggcaagcagacgattatgtaagcgctgaccgccatcaggggtattggccgccgcttttccaacatctgctgcacgaatgctcaagttgacctgaacaagagggccggtgatctgaccccccatgagctggagatcatcatgaccattgtggatgaaccccgcgcctacaacgtgcccgactggatccgcaacaggcagaaggacatcctccgatagctgcttcagccagacgacctcatc

SEQ ID NO: 396 - DNA, 381 bp, Chlorella vulgaris
acggacgcgtgggctagaactagtcatcatatcggcacgaaccgtcaacatgccgaagacggtcgtggttgattgccggggcatatgcttggccggctggcgagcatcctcgccaagcagctgctcagcgggcagaatgttgtctgcgtgcgctgcgaggagatcaacatctctggcggcatggtcaggcagaaaatgaagtatgagcgcttcctgaacaagcgcatggttaccaaccccaggagggctgcctacaagttcagggcacccgcccgcatcctgtggaggactgtccgcggcatgattcctcacaagaccccccgcggcgcagcagccctggaacgcctcaaggcctttgagggtgtgccccacccctacgac

SEQ ID NO: 397 - DNA, 418 bp, Chlorella vulgaris
  unsure (1)..(418): unsure at all n locations
gattgccaggaagtgcagtgacctgcaggcggcctgtgtggtcctggccaaacactctaagggacgcctcaaggagctctgggccggcagcgtcaccgtggcctgcctgcgcaaatgctgcaaggtgcctatcgctgtggttccgcactactgacctcctggtaaccctaagggcaagtggtaaaccccaaaggcatgcagcagctcagacagcagcgcacgcacgggacaaagcatggaccatcagcctacgttaaatggggtggatgctggaaacatggcggctggtagattttcgggtgtcagtgcaattacctatattgcactgatatgcactaacctattcttcaaccctggagtgcttcctggtgttacagttancaaagagttgtgctaacaagtgataggggggtcaatt

SEQ ID NO: 398 - DNA, 406 bp, Chlorella vulgaris
gatcactagcgtctccctagccttgcccaaatttcagtccataaacaggaaccatgcagtgcgccatgtccctgaccgtccgccccacccgtgtattcggggccaagcccatgaaggctcgcgctactcgcggcatgaaggtgcaggcctacaaggtcaccctcaagacccccagcggcgagagtgtgatcgagtgctccgaggatacctatatcctggacgctgctgatgaggctggcgttgagctgccctactcttgccgcgctggtgcctgctcttcttgcgctggcaagatcgagtctggcgaagttgaccagagcgacggctccttccttgaggacgagcagattgccaggggctttgtgctgacctgcgtggcataccccaagggtgacgtgaccatcac

SEQ ID NO: 399 - DNA, 355 bp, Chlorella vulgaris
agaccttcaagcgctaccgccagattgaggtcatccatgcccgctgggccatgcttggcgccctgggctgcatcttgcccgaggtcctgcagaggtacagcggcatcgagttcggcgaggctgtgtggttcaaggctggcgctcagatcttctctgacgacggcctgaactacctgggcaaccctgccctcatccacgcccagtccatcattgccaccctcatcacccaggtggtgctgatgggcgccgttgagggctaccgcaccaacggcggcggctgggagtgggccgagggcctggacaacctgtaccccggcggcgactactttgaccccctgggcctggccgacgaccc

SEQ ID NO: 400 - DNA, 364 bp, Chlorella vulgaris
cggacgcgtgggctcgtggatctttgaccgccccttgtccgtctaagacgggtcacttccagctctgaccgaccctggacgataagaaaggcacggaagtatgagtacaacggcactggagtgaccttggaggcgaccgcaaacacctgtgctcgaatttgctgagatattttggccgcccttgccctgggctgtctgggcaccccctctgcctcccttgtcacagcctggcgctgttaaatgtagcgctctggcggtggatgagttcagcctaccataactgccgctctcatggttctcgcattctcatgctgttccacttggtgggttgagagccttgttgcagtctagaatgttgtcccca

SEQ ID NO: 401 - DNA, 367 bp, Chlorella vulgaris
ctctacctaaggtcccagggcataccaagaaacctactgccctacccctcctggaagaaacacgttcaaaaattagccgactgggcagtcttcttgactcgggatgttccgcttttctacgctaagcatccttttgaagtttgtgatcaatgctggcccccagggatactgggaggcagttgcatgcagtttgcagggggttttgcattttcaatcatgtcaagggttttgagaagctaggtcatgacgtgtccagtctcatccatacggtgttcttaggcacgccgcttgattgaactctacctaaggtcccagggcataccaagaaacctactgccctacccctcctggaagaaacacgttcaaa

SEQ ID NO: 402 - DNA, 434 bp, Chlorella vulgaris
cggacgcgtgggaacaggtccaaggttcacaagatgcagaccctctctgcccgtttcggcgtccgcgcccctgtctcccggggcacccgccaggtgacccgcgcctccgtggagtggtacggccccgaccgcgccaagttcctgggccccttcaccaaccccccttcctacctgaagggtgagttcgctggcgactacggctgggacacctctggcctgtccgccgatcccgagaccttctcccgctacagggaggttgaggtgatccatgcccggtgggccatgcttggcgcccttggctgcgtcgtggccgagctgctggaccgcaacggcaccgtcaactttggcgagaacgccgtgtggttcaaggccggtgccgccatcttcggcgatgacgggctgaactacctgggcaaccccttcctcatccacgc

SEQ ID NO: 403 - DNA, 222 bp, Chlorella vulgaris
  unsure (1)..(222): unsure at all n locations
ctgctttgttttgctaatgactagagtagaagtagctaatgaagccgctacactgcaatttctgcggcttgggacccggcataagttttgggctagtccgacgcttagcatccctgcataatgctccgtcttgcagttttggtgtgtgctggaaggttcagcgtagctcagttttgtaaataataagtcactggttttganggaatgacacggagttgatgc

SEQ ID NO: 404 - DNA, 385 bp, Chlorella vulgaris
acaagccccttcagcaaaagatccacgatgcagaccgcctttgtccgctccggcctccgtgccgccgtccccaccgctggcaagggcacccgccaggtgacccgcgcctctgtggagtggtacggccctgaccgcgccaagttcctgggtcccttcaccaaccccccctcttacctgaagggtgagttcgctggcgactacggctgggacacctctggcctgtccgctgatcccgagaccttctcccgctacagggaggttgaggtgatccatgcccggtgggccatgcttggcgccctgggctgcgtcgtgcccgagctgctggaccgcaacggcaccgtcaactttggcgagaacgccgtgtggttcaaggctggtgccccca

SEQ ID NO: 405 - DNA, 332 bp, Chlorella vulgaris
cccacgcgtccgcccacgcgtccggtgaaacatggcacccaagaagaaggttgcggcccctcctgccgcggtcaggaaggccgctcagccggccaagcccgtgaaccccctgtatgagaagaggccgaagaccttcggtatcggtggtgccctgccacccaagaccgaccttcaccgctttgtgaagtggcccaagtatgtgcgcatccagaggcagaagcgtgtgctcaaccagcgtctcaaggtgccccccgcactgaaccgcttcacccgcacgctggacaagaacatggccgagagcctgttcaagctgctgctcaagtaccgccccg

SEQ ID NO: 406 - DNA, 380 bp, Chlorella vulgaris
gtcaagcgttgcacacggtgcctgaggcacgtacgcttgggacaacagggtaactcgttcacttgcaggagactttgccccttgtcttgacgactgagttggatcggccctcttaggcagcctgctgcaccaggccagcctcccttgagtgtggtgtagcatggccagcgggtttggcatcaacgggggccagggaaggtgctacccgatctggatggacttctcagagtgtatgagcaagactgatgaccccaagctgtgcacggattatcgcgatgactatctggagtgcttgcatcatacgaaagagtttcagaagctgagtagcttcttccgggaggacaagcggcagcaggacgagcgggcctctggcaagagca

SEQ ID NO: 407 - DNA, 390 bp, Chlorella vulgaris
cccacgcgtccggctggactccgaggtgctgcgcaagtacatcatgggcggccacgtggccgagtacatggagcagatgaaggaggaggagccggagaagttccaggcgcacttcagccagtacctcaaggagggcctggaggctgacgacctggaggacctgtacaccaaggtccatgaggccatccgcgccaaccccgaggccaagaaggccgagcgcaagcggcccgccgagaccaagaagtggaagctcaccaagctcacctacgacgagcgcaagtccaacctcaaggccaagctggcagagctgacctccgagtaaaggcccaggcctgctgggtgcaagcactgccctctgagggacgggtgattttcattccaagggctgct

SEQ ID NO: 408 - DNA, 390 bp, Chlorella vulgaris
gaaagatggtggcgaccgcagtctgccaggccgtgtccaagccttccctggccaggaagaccttcggcgctgcagttgccgccaagccctcccaggctgtgtgccgcgtgaacaggcgtgtcgagtgcagcgcccagaagaagcaggaggcgctggttgctggtgtgaccgtcggcgttgctgccatgatggccaaccccctggttgctgaggctgccgtgaccccctccctgaagaacctcctcaactccttgattgccggcggccttgtgctgggtctcatcgccgttgccatcactggtgtggccaacttcgaccccgtcaaccgcaagtgagccggcggcggcggcggcgcgcctgtggcgagccagcagcagtagcagcatgcag

SEQ ID NO: 409 - DNA, 369 bp, Chlorella vulgaris
cccacgcgtccgctggggtgggtggagagagcacgatacaatgaagttctctacccgcgtcagctcctccaggcggaagtgccgcaaggcacacttctcggcgccctccagcgtccgcaggtcgcttatgagcgctcccctctccggcgagctgcgcaacaagcacggggtgcgctctgtgcccatccgcaaagacgacgaggtgaccgtcgtccgcggtacctacaagggccgtgagggcaaggttgtgcaggtgtaccgcaagaagtgggtcatccatattgagcggatcacacgcgagaaggttaacggcgcaaccgtgaatgtgggtgtcgacccctccaaggttgtgatcaccaagctgaagat

SEQ ID NO: 410 - DNA, 418 bp, Chlorella vulgaris
gttggggttgagtggctgggttgagtggctagcgaccgctcgttgccaaggagccggggcgaagggtcggcctgacaggtaggcgcgcctgccgcgctgatgatgtgagtgagctggcttgcagccatggacacaggtgctgggacgggcagcggggccaccagttgaactgcctgagactgtacagtcggcaccacctcgtaggtgggagggttgcttgaaagggttacgtgaggtggagctggctgcacacagtgggagttgaaaggagtcccaagcagggttctgactggttcagcggcgcccccgccacccggcgcaatgctgccgtgagccgcaacaacctgacagcacatgcatcagggggcgcacacctccatcggtcgtgccacctggccccagtccagtagcagcggtg

SEQ ID NO: 411 - DNA, 437 bp, Chlorella vulgaris
  unsure (1)..(437): unsure at all n locations
aggacgcgtggggccgcagagaccgttgtcaagcaaggccaagaaggctggacatgtcaagaaggtcgcagcgaacagacatgggaaggatctgaaaaccaagaaaggtcgcctggccaagccaccaaagaagggtcaggcagccaaggactacaacgagtcaagggagctcaccaaagcgatcaatgcggagaatgaggagcgtgcagctggggttgcggcgagcagtggagggcaactgaacgtggtgaagccgcccccggtccttgccacggctgatcaaaagcagaggcagcagaagggttctgaaaagtgattgcagcagctgtttacccccgagagcagcttggcttcgtgcgaaccctttgtaaggctactgangggtctgtgtccgacatatgttaaggacatatgatatcgttgcatgcctgactttg

SEQ ID NO: 412 - DNA, 338 bp, Chlorella vulgaris
gctgcccaagatatacaggaaggtgtactacagtatctccgccgccatccactcccgcatcgtgcgcgtgcgctcccgcaagaaccgccgcaaccgcgagccgcccaagttcgtgcgcgggggaagcgtcggcgccgcacgtggcggctaccaaaggcctggcggcccccagcagcagtgattgagtgccacaggtagtgcccgctggggccagcgcggcaagtggagcaagccgggcgggccgcagcagattgagtgctggtggccagccgtgctggggggatgtcaaggccctggatatgcacacacatgtctgagctagcaggactgctgctgat

SEQ ID NO: 413 - DNA, 386 bp, Chlorella vulgaris
aaacgtcacagttgtaggggaactgggagggcaaagccccaggtttggcgataaaatgatgggcactatgactgccccgcagaccaggtgcttgggctttaggtctaacgttgccagcaggacagccttccagccagcccagagggcgccgcagaggcttagaattcagactatccagatagagaacgcgctaagccggcagcggaaggaggagacggtggacaagctggtgcctctcctgcagcagagcgctgtggtcgtgggcctacgctaccagggtctctcggtcaaacagatccaggacttcaagcgcagcctccccaaggagaccaagctgattgtctgcaaaaacacgctattgaagcgggcagcggatgaggtggagg

SEQ ID NO: 414 - DNA, 420 bp, Chlorella vulgaris
atggcctgaactacctgggcaacccctccctggtccatgcccagtccatcgtggccaccctggccgtgcaggtcatcctcatggctcaggctgaggctttccgtgtgagcggcactgccccctggagcggcgaggagctcgacaccctgtaccccggtgatgcctttgacccccttggcctggctgacgaccccgacacctttgctgagctcaaggtcaaggagatcaagaacggccgcctggctatgttctccatgttcggcttcttcatccaggcacttgtgaccggcaagtctcccctggagaacctggccgaccacctggctgaccccgcctccaacaacggcttctccatcctgaccgccaccaagttcaacccctgaattcagccctgaaatttgagggaaatcccctggctgc

SEQ ID NO: 415 - DNA, 268 bp, Chlorella vulgaris
acggacgcgtgggcggacgcgtgggcgcgcgaagtggaagaagaagaggatgaggcgtctgaagaaggaaaccgcggaagcagaagggcaagtgattgcacagccccgccttgcagccaacggcctgcaaccttggaggatgcaacaaccagctgcatgtgcccccaaagtctgaaaacgctctttaatgtaacatctgcgcgtcgcaaaaaaaaggacaatggctggagccagcatgcacctgttgttctacaaggtaacactgatc

SEQ ID NO: 416 - DNA, 209 bp, Chlorella vulgaris
gcgtccgacgacaacgtccgcggacgcgtgggcggacgcgttggcagacgcgtaggatgacgcttcgtatgaggacgcggtttgagcacttgtgcaagtgtcagtgcgcagtcgcgccagcattccagcgacctgctgccatgattaatgcggcaatcagctccctgtccgcgcgtgatgttgacagggatctttactctaacatctac

SEQ ID NO: 417 - DNA, 238 bp, Chlorella vulgaris
  unsure (1)..(238): unsure at all n locations
gacgagaactacggtgagggctcgtcccgcgagcacgctgcgctggagccgcgccacctgngcgcgcgcgccgtggttgtcaagtcgtttgcgcgcantccacgagacaacctgaagaaagcagggcctcctgccactcaccttttgccgaccctgctgactacgacaaggtgggtcccttttgacaagatcgccatcaagggcctgaccagctttgcgcccggcaagccgctgacgc

SEQ ID NO: 418 - DNA, 442 bp, Chlorella vulgaris
gtccaagccccttcagcaaaagatccacgatgcagaccgcctttgtccgctccggcctccgtgccgccgtccccaccgctggcaagggcacccgccaggtgacccgcgcctctgtggagtggtacggccctgaccgcgccaagttcctgggtcccttcaccaaccccccctcttacctgaagggtgagttcgctggcgactacggctgggacacctctggcctgtccgctgatcccgagaccttctcccgctacagggaggttgaggtgatccatgcccggtgggccatgcttggcgccctgggctgcgtcgtgcccgagctgctggaccgcaacggcaccgtcaactttggcgagaacgccgtgtggttcaaggctggtgccgccatctttggtgatgacgggctcaactacctgggcaaacccctcctcatccacgcaca

SEQ ID NO: 419 - DNA, 360 bp, Chlorella vulgaris
cacacgcgtccgcccacgcgtccgcggacgcgtgggcaggccttgcggtggcagcattagcgtggcgacgacggtagcttgtaaggggcatcacgtcatttttaccttcacatcattgatgtttgccattccgaaaaggctgcagccaggcagagaaggagtagcaaagggcggcaaccacctgagcttgtgccgggatgccctgtgcctgattactaactgcatcagctctgcaatttgctggattgttgatgtcatgttgcttgctgcacatcccttggggggtacactgcacggattttgttggttcgcacgacacctgctgctaacacatgttgcacttatacatgtttccacatc

SEQ ID NO: 420 - DNA, 65 bp, Chlorella vulgaris
cactgttttacctgtgacagggacgaccgctccttgctaacccatgaaaggtaatgacagcaagg

SEQ ID NO: 421 - DNA, 374 bp, Chlorella vulgaris
agtttttctacaacgacgtccagaatgagcctttcgctgagcagctgcgtgagaagaagaggtggtttgaggagcaagacaaggagctggacttttaccttgtgtcccagcctgcgtggctggagtccaagtttcccgaggagggcaagcgcgtgagcaaacctgctgtggccctcgtttccaccgaccccacctggatcctgttcatgaagctgcgcctggaccgcgtcctgaagctggaccttggcaagatgagcctggacgaggtgaccaagtctaacggccccgtcaccgagctgaagcctcacgagaagtggattgccccttaccagccgtacgcacatggctggtggaatgtgtttgagcgcaagtga

SEQ ID NO: 422 - DNA, 406 bp, Chlorella vulgaris
gagcggcggccccatggccctctaccagggcttcggcgtgtccgtgcagggcatcattgtgtaccgcggcgcctactttgggctgtacgataccgccaagggcgtgctgttcaaggacgagcgtaccgccaacttctttgccaagtgggccgtggctcaggctgtcaccgcgggtgccggcgtgctctcttaccccttcgacaccgtccgccgtcgcctcatgatgcagtctggcggcgagaggcagtacaatggcaccattgactgctggcgcaaggtggcccagcaggagggcatgaaggcgttcttcaagggtgcctggtccaacgtgctgcgcggcgccggcggtgctttcgtgctggtgctgtatgatgagatcaagaagttcatcaaccccaacgccgtg

SEQ ID NO: 423 - DNA, 363 bp, Chlorella vulgaris
gggaagggcttgtcttccgcaagccaaaatgccgtccataggcttttaccgcaactatggcaagaccttcaagaagccccggcgccccttcgagaaggagcggctggatgccgagctgaagaccgtgggcgagtacggcctgcgcaacaagcgcgagctctggcgtgtgcagatggtgctgtccaagctgcgctccagggcccggtccctgctgaccctggacgagaaggaccccaagcgcctttttgagggtgaggccctcatgcgccgcatgtaccgctacggcttcctggacgagacccagaacaagctcgattacgtgctggcgctcaaccctaccgacgtgctggagcgccgcctgca

SEQ ID NO: 424 - DNA, 265 bp, Chlorella vulgaris
atccgtctctggagccttccccggctgagaaggagacgtcaacatggtggctgccagcaagaagagcaagaagtctcatgagagcatcaactctcgtctggcgctggtgatgaagtccggcaaatataccctgggctacaagaccactctgaagactctgcgcaacggcaaggccaagctggtgattatcagcaacaactgcccggctgtgcgcaagtctgagatcgagtactacgccatgctctcaaagactggcgtgcaccac

SEQ ID NO: 425 - DNA, 410 bp, Chlorella vulgaris
cccacgcgtccgcgcaatagttccagggcaatcactatgcaggcaaccatgatgaagaccttcggcgccagcctgcgcaaggctgtgcccacccagggcaagggcacccgccaggtgacccgcgcctccgtggagtggtacggccctgacagggccaagttcctgggccccttctctgagggctccacccccagctacctgaagggcgagttcgccggcgactacggctgggacactgctggtctgtctgccgatccccaaaccttcgctgcctaccgcgaggttgaggtcatccatgcccgctgggccatgcttggcgccctgggctgcctgacccccgagctgctgcagaacgccggcgtggccagcttcggcgacgctgctgtgtggttcaaggctggtgcctccat

SEQ ID NO: 426 - DNA, 404 bp, Chlorella vulgaris
accacgcgtccgggcgttcttggcaccatggctgagaagtcatgcacgatcaggacacgaaagttcatgaccaaccgcctgctgcagcggaggcagtttatccttgatgtgctgcaccctggccgtgccaatgtctccaagactgagctgcgcgagaagctgtccaagatgtacgacgtcaaggactccaactgcgtgtttgtctttggcctgaagacccagtttggtggcggcaagtccacagggtttggcctcatctacgacaacgtccagggggccaagcagttcgagcccaagtacaggctcatcaggaacggtctggcgcagccggtgcagaagtcgcgcaagcagcagaaggagcgcaagaaccgcaccaagaccatccgcggtgtcaagaagaacgc

SEQ ID NO: 427 - DNA, 409 bp, Chlorella vulgaris
aggctcttcgttcatcgggtgggccggtcaaaaatggcggatcacgaccacgagcacgatgttcacttcgagtctgccgatgccggcgcctcaaagacctatccccagcaggctggtaccatccgcaagaacgcatacatcgtgattaacaaccgtccctgcaaggttgctgacgttgtcacctccaagaccggcaagcacggccacgccaagtgccactttgtgggcattgacatcttcaccggcaagaagtacgaggacctgaccccctcctcccacaactgcgacgtgccccacgtgaaccgcaccgagtacacgctgctggacgtctctgacgacggctttgtgtcgctcatggacgagaaggggaacaccgttggacacctgacgctgcccaagggcaccgacg

SEQ ID NO: 428 - DNA, 387 bp, Chlorella vulgaris
atgatcagacgaaaccgtcgaaaccctgcgatctcagtcgctaggtcgttgcggccgttgcgggcgttctcatcagcaaggaggcacagcttgtcgcgctgtgtggtcaccatgtcggcatcaggcagggctggagcagtgaaggagactcttggcaccgaagcatacgaaaacctggcagggaagcaggtttacctggtctccacacaggaggctttggatattactagcctctggagccaggatgaccgagcagtgctcgtctttggcaggtccatgggctgacccttccgttgggaactggcaacacaggtcaagccggatgtgttgccaactcccaaggaaaaaggaattaaggtgtatttcaataacatccggaaaccaaaa

SEQ ID NO: 429 - DNA, 403 bp, Chlorella vulgaris
  unsure (1)..(403): unsure at all n locations
cacgcgtccagactagttctagcccacgcgtccgctcttctgcaccctgaccagcattgtatgcattgtggctagctagtctttgtccaagtgggaggaagtggccggactttcagtgacacttgcagcatctgcgttatgcagccatgcctgtatgagctgtttgccttggccaagccccgcttagccaaagcgcagctgggggagatcatgaaggctgccaacanggcggtgctggaccacggcggcgtcatcactgacttgaagtctttcggtgaccaacctctggcctatgatatccgtaagcctggagccaagtatggcgaggccggcatgtggcagctcacttttgctgccaatgctaaagtgcttgctgacatcgaccaaaacctcaaagttgatg

SEQ ID NO: 430 - DNA, 347 bp, Chlorella vulgaris
gtttacagcttcataccgtcaggagccttattagtgtacgaacaccatggtggcagtgatcggcaagccagccccggctttcactgcctccgcagtggttgacggcgatattaagaccgtgtcgctcagtgactacaagggcaaatacgttgttgtcttcttctaccccttggacttcactttcgtgtgccccaccgagatcatcgccttctccgaccgcatccaggagttcaaggacgttggtgttgaagttctgggggtttccgtcgactccgccttctcccaactggcctgggtgaaccaacctcgcaagcaaggcggcctgggccgcctcgcctaacccctga

SEQ ID NO: 431 - DNA, 293 bp, Chlorella vulgaris
agtggactttgcctacggcctgtttgagaaggcggtgcccgtgagcaccgtgttcagccaaaacgagatgattgacaccatcgccatcaccaagggccacggcactgaaggtgttgtgacccgctggggtgtgtcccgcctgccgcgcaagaaccaacgtggtctgcgcaaggtctcctgcatcggcgcctggcacccggcccgcgtgtcctggaccgtggcccgcgctggtgccatgggttacaaccaccgcaacgggattgacaagaaagttttaccccttggccttaaag

SEQ ID NO: 432 - DNA, 198 bp, Chlorella vulgaris
  unsure (1)..(198): unsure at all n locations
accacgcgtccggtcgggctgaagcttggggagctgataagcagggtgacatgatcatccccgtgagatgcttcacctgtgggaaggtcatanggaacaagtgggatacctacttggacctactgcaggcagagtactctgaaggggatgctctggacgctctcggtctgacccgctactgctgcccgaggatgctca

SEQ ID NO: 433 - DNA, 451 bp, Chlorella vulgaris
gggtcgggccacgcgtccgaaattatttgcaccagagttgaacccaatacgagatggcatccaccagtgttctgtgcagggctgccctggtggctcgccccactggtctggctcgccccgcccgtctggctgcccccttggcccatccccgtctggccaagcgctcccttgtggtgcgcgctgagacggagaccacccaacaagtggatgtggagaaggttgtgaaggacctccaggacaagtgggacaaggttgagaacaagactggagtgattgtgtacggctctggtgctctcgtggcgctttggctggcatccactgtcgtgggagcgctcaacaaccttccgctgctgcccaagctgtttgagcttgtcggtttgggctacagcgcctggtttacttaccgctacctgctgttcaagtctagcccggaggagctcatcgaggacat

SEQ ID NO: 434 - DNA, 402 bp, Chlorella vulgaris
actttgcccccaagtcgagcgcgggcccccacaagacccgggagtgcttgccgctcatcctgctgctgaggaacaggctcaagtacgctctgacgggcaaggaggtgacgagcatcctcatgcagcgcctggtataggttgaccgcaaggtgcgcactgacaagacctaccccgtgggcttcatggacgtggtcaccatccccaagaccgacgagcacttccgcctggtctacgactgcaagggccgctttgtggtgcaccgcatcagcaaggaagaagcggcgtacaagctgtgcaaggtccgccgcgtgcagtttggcaagggcggcgtgccctacattgccacccacgacggccgcatcatccgctacccggaaccagacatcaaggtgaacgacactg

SEQ ID NO: 435 - DNA, 218 bp, Chlorella vulgaris
acccacgcgtccgcggacgcgttggctgacacgtgggcggaaacgtgggccacgctgaatgagatcaacgtgtcaaactctgtgtttagtttggtgatggctatgagtaataagccagcttcagcattagttcttgagggagaaccaaaatcagatcctgcagtgaatcaggtgtcagttgtccacacaatacatcccgggctctgctgcggcccctg

SEQ ID NO: 436 - DNA, 363 bp, Chlorella vulgaris
  unsure (1)..(363): unsure at all n locations
acccacgcgtccgggccatagtagctcttgagttgctccttggggacatgactgatgatgttgcccattgtgagagcgtcagctttctattctgtagaagttaaaggtggtttcactctttctccatcacgccgttgcgttgccactggcattcactgaatgccaaatggcatgtggtggcttgaggcctatcaagccttgtctccaatcacggcattgacaaatcacgattgaactcctcattaaaagtaattgttactaaatagtatgtggctgtcatgtaagcnaaaactctacctaaaaaaaaataaaaaaaaaagaaagtataatataaaaaacatttatatagaaaaaactatattt

SEQ ID NO: 437 - DNA, 280 bp, Chlorella vulgaris
acccacgcgtccgccggactataaggagcttgatgcacagattgagcagctgatgcagtgcaagcccctgtcagaaggctaaggtaaagggcctttccagaatggcaaggaaattttttcagaaggagtcaaacgtgcaaccccgtgcgatgcccagtcacggtgttgtggcgacatccacggccagttccaagacttgctggaactcttccgcatcggcggctactgccctgacaccaactacttattcatgggggactatgtggaacgcggctaccac

SEQ ID NO: 438 - DNA, 442 bp, Chlorella vulgaris
acggacgcgtgggggaggacaacggtgatgtggtgactttcctgtttgagaacaaagatcaaagcagggtatctgagtttgagctgaagcttatggacatcagcagtgaaaacctgggcatcccagaaacggagtatgcagcagtggtgcggatgccctcagcagagtaccagcggattgtgaaggacttggcctcgatcggtgacacagtggagatcagcgtgacaaaggatggagtcaaattcggaacaactggcgatattggctctgcaaatgtcatcgtgcggcaaagcaataatgtcgacaagcctgatgagtcgaccgtgatagagatgaacgaggcggtggccctcacctttgcactgcgctacctcaactcatttgccaaggccacctcgctctcacccactgtggtgatccggctaagcaaggagctgccggt

SEQ ID NO: 439 - DNA, 377 bp, Chlorella vulgaris
acaatcccttcttctctcaatccaggtggtgcctggccgctggtttccacgtcgtgacctgaggtagcttgctgtagacgcttcatatccagccatgccttgggagggcgtccaggtgcctcaggatcccccaagttataaccctgacgacaaatatgccgaggcggtgctctacttccagcaccgcgaggctgccacagcagaggagcttgctaaagttgccgaggcacatttgttcaggaacacgctgaggaggtgctacagggagtcgggcgtaaactacctgcaagactgccggcagctaccggagcactacttggaggcgattaagggtgttggggtgtaccgctcaaactctgggcccaatgacaagccca

SEQ ID NO: 440 - DNA, 414 bp, Chlorella vulgaris
  unsure (1)..(414): unsure at all n locations
agggtctgtctcttgggcagggccactggctggatcacaatgccagctgccatgtgttgtcgagaatgagcagcgcgcatgcattttggctcgtcgcagctgtgccgctgatctgaatgcggtgatgcaggtgcgtgtgggtgctgggttacagtgggtgccgcccagtggccctcgtcgcctgtcgctgtgtctgtcgctgtttaagcgttatatgtgactgttgcctggcatcttctgcccagtctgtggctgccttcaatctagcagcactgcttcccccgtggtttgggtttggtcaccaatgctcctgttttttatatgacagctgtctgtgcttcttcttgctcctgcttcgttggtgtgtacctgcgtgtgccaaggacattgccaaganggcgtgcccccattagc

SEQ ID NO: 441 - DNA, 432 bp, Chlorella vulgaris
agcgacgtgcgcgtggacgtcaagctgaacaaggccgtgtggagccagggcatcaagaacgtgcccaaccgcctgcgcattgtgatccagcgcaagcgcaacgaggacgacgacgagaaggaggagatgttctccctggtcaccctggccgaggaccagagcagcaagggcaagggcgtggtggtcctggaggcataaacacacacacgcgcctcgcggggggagctgccgcagcagccagctggcaggttccgtgcctggggatcgcgctgggcctcgcgtgggccttgcctttcaaacggttggtgtgggcggcgtttctggcggcgtttagggtctcttgcagacccttggtcgttgtgcaggccccagatgtcgctgtatcgaacccagctggcggtgccctgttgcggtgcttctggctcactgtgg

SEQ ID NO: 442 - DNA, 426 bp, Chlorella vulgaris
agcctgaccctcttgcctccttttcaccatggcctctgcgttgattgccaagcccactgtggcccgcgtcttccagagccgtgcgtccaccgtgcgagccaggagcagcgtgaaggttgcagccgctgagaggcagctgtggctccccggcgcggacgcccctgcccacctgaagggtgacctggccggcgacaggggctttgatcctcttaaccttggaaccgaccccgagcgcctcgcatggtacgcggagggtgagaggatcaacggccgctgggccatggctgccgtggccggtatcctggcccaggacctgctgggcaagggcaactggttcgaggccggctcccaggagtactggctgcccaacaatgcgctgctggccatcgagttcctggtgctgggctttttggagcttaagcgcta

SEQ ID NO: 443 - DNA, 421 bp, Chlorella vulgaris
ctcgtcactgcttctgtaacacacctacatccttgctgcatagcaccatgctgggaggagtgagcagctccatcgttcgccagcgggctctggtacctttccaggcagcaaggcagcaggcatgcagcagcaggcgaggactatccatcagggcatcggccctggcgttacccagcaacttcaccaagattatgcccaagggtgaccttgtgctggccaaggtggcagaggtggaggagaagaccacaggggggatcttactgcccagctctgcccagaagcgacccacgtcaggtgatgtggtagcgcttggcgatggccgcgtgggcccccagcagcacagctttcagctgaaagaaggcgacaccgtcttgtacagcaagtttgggctgggcgtcacagaagtggagctccaaggggc

SEQ ID NO: 444 - DNA, 379 bp, Chlorella vulgaris
  unsure (1)..(379): unsure at all n locations
cccacgcgtccggtggttgcccctgcggaacccaggcggcggggcaggccccggctcacacctggggtggtcgcggagcagcggcagggcatgggaggggaaaggcacgcggagcaacagcgacagcaagaagagttaggacagggcagtggtgcaacacgccacgtggcacggggtcctttaggaggggccaagggcacacctgctgctgcaccgggagcccaattggcggctggcagccgcggacccctggatccctcagcacagcaggggaggaatctgtcctcggacgagatgctggattccctgcaacccctgctggagcggtcaggggtggacgaccacctgctgctgggctttgangcggggtttgctgaac

SEQ ID NO: 445 - DNA, 377 bp, Chlorella vulgaris
  unsure (1)..(377): unsure at all n locations
agcgccccaacaccctgcagttccatgactccaacatcaagttcccgctcacccgcaagatggccaggccctccgaccccacccacaagtctgtgtttaaggcggtgcgccccaacgttgccatctggtaacctcttactaccccttagtagccgcgtagtccccgtcgcggcagtagcctgggtctggcagcagcactgctgcggcagggggcagcggcgtcagctgcctgggggcggtggtgcgtgtgcggtaaagagaggagccggcgagaggcagaatggcttgccaaccagtttggggcccctctacttgaaggatcacgangcgggaagggctgagtctgtagcagcgcagccatgtaaccaggcctttta

SEQ ID NO: 446 - DNA, 386 bp, Chlorella vulgaris
  unsure (1)..(386): unsure at all n locations
cggacgcgtggggtcggccagtctcaagagcagggagtggatgtgcctcacatagtccatgtcgtcacggctcatgcacgcagaatacgcacacggtgatagaatagcgcagccacgtttcgaaccttacgcacgggcaactgggaaaaggaacatgggaaaaggacggggggccaagcaagggaagggtgcaaattcaacttgaggaggctaactgggcanacttcataaaggtcactgccagccaagacccgcgcacgtacgctgccaagctggcctggaatgcccgcaagaacgagctggatgccatgctggcaacaggcccacctgccatcaacaccgccgtcaaggctgtggcgattgcccgcaagctgctggaagatgac

SEQ ID NO: 447 - DNA, 429 bp, Chlorella vulgaris
atgcttctacagtcggccaacatggttagccgtctgagcaagaaccgcaagaagcgcggtcatgtcagcgccggccatgggcgtatcggcaagcacaggaagcaccccggtggccgcggtaacgccggtggccagcaccatcacaggattatgatggacaagtaccaccctgggtactttggcaaggtgggcatgcgctacttcaacctgaagaagaacaagttccactgccccatcgtcaaccttgacaagctgtggagccttgtgggcgaggaggctcgtgttgaggcctccaaggactcgagcagcgctgccgtgattgatgtcaccaagtatggcatcttcaaggtgctgggcaagggcgagctcccgcagcagccagtggtggtgaaggccaagtttgtgagcaagctggcggagcagaaaatc

SEQ ID NO: 448 - DNA, 233 bp, Chlorella vulgaris
accgatacggcgaggagactgagggcctggcggtgctgcaggagtacctgaagagccgctgagcgcatgctgtgctgggcatgctgtgcacccgcccagggcacgcgctgtgagcgctgtgctgggcagtgcactggcatccccggcgtgtagatggcgccggctggctggctggcggtggtgcatgctccctgtgggacggcacggccgatgaccgtgtaacacacgtggag

SEQ ID NO: 449 - DNA, 376 bp, Chlorella vulgaris
gcgccacctggggcgagcagggctacttccgcctgtcctccgctgccaagagcaaggagggcacctgcggggtgaacaaggtggcttcctatcccgtcaagaagtccgaccagaacccgcccgtctacgacatctgcggctactttggctggaccgagtgcccgcccacctcctcctgcgtctgcgagtttgacctgttcggcctcttctgcttccagtggggctgccatgcaacacccgatgctcagcaggcggcgtgagcgctgctcagcaccaggttggattgcatggatacttaaacgtctggcattcttttcagtagtgcatctgactgtgactggccaacaggagcgtacgtgttgtgcctgtgtctgac

SEQ ID NO: 450 - DNA, 440 bp, Chlorella vulgaris
acgtggtccaagcgctgtacaagtacgtggtgcccaagccgcgcagcgagtgcagcaagacggagcagctgggcgtgtcgttcgctgccgggtacattgcgggagtgctctgcgccatcgtgtctcaccccgcagacaacctggtgtccaagctgaatgcgaccaagggcgtgtccgctggcgagattatcaaggagatgggctgggtggcgctgttcacccgcggcctgccgctgcgtatcatcatgattggtaccctcactggcctgcagtggggcatctacgacgccttcaaggtcttcgtgggactgcccaccaccggtgccgaggtgaagaagtgaacaatggatgcagcaactcacggttgaaagccttgctgacctttgaagccctgccaccgcgagctctcccttgatgccgtcactttgcggcctgccgcg

SEQ ID NO: 451 - DNA, 396 bp, Chlorella vulgaris
  unsure (1)..(396): unsure at all n locations
atcagatccctggtccctcatgtctgtctccgacgatgccaaggagggcggnggcggcaccctgcagctgtggcgggtgtccgacctcatctaccgccccgatgatgaagtgctggctgagctggagcagtacagggactacatcgtcagtggcaaccaggccaagctgccggcgcagccctcgcagcagaccacgcagcgcccagcagactcggcaggcgtgtcccagcaggcacagcatcgtgcaaacgggagtatgctggggcagcagccacagcgcgagggcaccacagaggttgccacagccgcccttgtagccccctctcaggctgcccctgttctgccggcagtggccancgcccctgctttgccccccatggagcttgtgcagcagct

SEQ ID NO: 452 - DNA, 440 bp, Chlorella vulgaris
  unsure (1)..(440): unsure at all n locations
gtaggctacagtttgagggagcatcaccatgccggcgggacagggctacagggcccgcacgaggtatatgttccaacgccccttccggggcaagggatacattcctctctccacttacctgaccaactacaaggtcggcgagtatgtggacgtcaaggttaacggcgcagtgcacaagggcatgccccacaagtactaccatggcaagactggccgcgtgtggaacgtgaccaagcgggcagttggcgttgagattagcaagaaggtgaacgggcggatcatcaacaagcgcatccacgtgcgcattgagcacgtgaggcccagccgctgccgcgaggagttcctgcaaaagtgcaaggagaacgatgccaagaagcacgcggccaaggtggcaggcgagccccaccntggtgacaagcgtcaacccaagggcccccgca

SEQ ID NO: 453 - DNA, 431 bp, Chlorella vulgaris
cccacgcgtccggtgcggtctgtaaggcgcattgccagaagccagcgtccgccgggcaaaacaagccaccatgaggaacgacgctggcgagattgtggatctgtacatcccacgcaagtgctcgtggaccaacaagctcatcacggccaaggaccacgccagcgtgcaggtcaatattggccacctggatgagaatggcgtgtacactggcagcttcagcacctttgccctgtgcggccaggtccgctccaagggtgaggctgatgccgctatggacctgctctggcagaagaagaaggctgagattggccagcagtgattggagcttgagcgcgggcagcacgctgctgtgcacgctgtgatgccctcggagcaaagcgggcagtgcacggtcatggcagttaccatttggcagcggcatgtggtacacc

SEQ ID NO: 454 - DNA, 394 bp, Chlorella vulgaris
gtgcaaaatggcgagcaaggtgtccggcgaggtgctgcgtgagggtatcgctggggtgctggagggctccaagtccaaggcccgcaagttcacggagaccgtggagctccagattggcctgaagaattatgacccccagaaggacaagcgtttcagcggctctgtgaagctgccttactgcccccgtccccacctgaaggtgtgcgtgctgggtgaccacaagcactgcgaggaggcccagaacgcgggcattgacgcgatgagcgtggatgacctcaagaagctgaacaagaacaagaagctggtcaagaagctggccaagcagtatgccgccttcctgtcctctgacagcgtgatcaagcagatcccgcgtctgctgggccccggcctgaac

SEQ ID NO: 455 - DNA, 338 bp, Chlorella vulgaris
agcttggcgccccgagagttttgtttgcggtcttggttgtgctgggggggggggggggacttactatctcagacactcagacaggcccccaaagcacacattgggctctgacagttctcacacgtggccactaaagccttgttcccaagttggtggaacggctggtgttcttggcatgggcagcaatccagcactggctgtggctggttgtgtagcattagctttcccgaagcttgaggtgtgctgtgccccgaccagttgactggacgggcaatgtgttttggtggacaggcagctaggtcttttctactaacaaactgtggtagggtgctctcaaa

SEQ ID NO: 456 - DNA, 402 bp, Chlorella vulgaris
cggacgcgtgggcggacgcgtgggttggattgatatcagagatagtgggcccccatcgaccacactgtctccaccaaattgcttgatattaacctgctactcctggcagaccgctttccgaacaactcctgacccagcggcacctctctgccagtgttgcatcagggttcacctgcccatgcttcgctcactagcaacgtctctgggccctgccctacggtgggaggtgcccttgctgaccaagggtgttaagttcaacaaaggcattgtggggtttccaatggatcctgaaggcagggagcaccttgcgggaaaagtagggtgcactgttggatgccctgaacatcaattccagcacagcagagtaccgcttggcagtggagaagactgtcaactacaagc

SEQ ID NO: 457 - DNA, 388 bp, Chlorella vulgaris
cttgtgcggtctgtaaggcgcattgccagaagccagcgtccgccgggcaaaacaagccaccatgaggaacgacgctggcgagattgtggatctgtacatcccacgcaagtgctcgtggaccaacaagctcatcacggccaaggaccacgccagcgtgcaggtcaatattggccacctggatgagaatggcgtgtacactggcagcttcagcacctttgccctgtgcggccaggtccgctccaagggtgaggctgatgccgctatggacctgctctggcagaagaagaaggctgagattggccagcagtgattggagcttgagcgcgggcagcacgctgctgtgcacgctgtgatgccctcggagcaaagcgggcagtgcacggtcatg

SEQ ID NO: 458 - DNA, 370 bp, Chlorella vulgaris
ggttatttagacaatcggattcagccattgagatgcagtagccctatcgtggggctgaacaaagattggacaaaaaggaaaaatagtaaataagtaaaaaaaaagaaagtagaacgtggaaaaacaaacaaatggggggaagaagaaggggggtgagtctaggtgatcattggatacgtggataagaatcgcctgtagagtggcagaatcaggacccttgccttgatgtgatagaatcgtctttaaaggtaatgctgagggtaaatggagtagctccggaacaaaaagaccgctgagacaggccagcattcataggaacttgagcgcgggcagtaggccgcactaaaagctgtgaagcccgattggcaaa

SEQ ID NO: 459 - DNA, 266 bp, Chlorella vulgaris
aaaaaaaaaaaaaaaaaaaaaaaaaaaaaaaaaaaaaaaaaaaaaaaaggaggacgctcaaaaaagaataaaaagcatacttaaacatgcatgaaaaaatagaaactcttccaaaatgatagggaggtttcttttcagtgtccgtccttttataactttcatgagtgggataaaaactgtcgttacctatctcaaactttaattatatgagccctctttttacaactgctttactggcaaaaacggtctctacaatagctcttccc

SEQ ID NO: 460 - DNA, 436 bp, Chlorella vulgaris
cgtggaatcccccgtcgacaacaggtccaaggttcacaagatgcagaccctctctgcccgtttcggcgtccgcgcccctgtctcccggggcacccgccaggtgacccgcgcctccgtggagtggtacggccccgaccgcgccaagttcctgggccccttcaccaaccccccttcctacctgaagggtgagttcgctggcgactacggctgggacacctctggcctgtccgccgatcccgagaccttctcccgctacagggaggttgaggtgatccatgcccggtgggccatgcttggcgcccttggctgcgtcgtgcccgagctgctggaccgcaacggcaccgtcaactttggcgagaacgccgtgtggttcaaggccggtgccgccatcttcggcgatgacgggctgaactacctggggcaaccctccctcatc

SEQ ID NO: 461 - DNA, 413 bp, Chlorella vulgaris
gggtgaacgtgcccctcactgacgccctgccgggtgtgcagcttatcgagcctgtggccccacccacaacagcccccactaccgagaccaccaccctgtccaacgggctgagggttgctagcgagaacaccccgggggccaccgcaaccctgggcatctatgtggacagcggtagcgtgtatgagacacctgtcaacacaggcgcctcccacctgctggagtacctggccttcaagaccaccaagcaccgcacccacctgcgcctggtgcgtgaggttgaggtgatcggcggcaacgtgctggcctcggcctcgcgcgagcagatggcgtacaacatcgacacctccaaggtcaccgtgcccgaggccctggaagtgctggcggatgccgtgctcaaccccaagttccagagc

SEQ ID NO: 462 - DNA, 409 bp, Chlorella vulgaris
  unsure (1)..(409): unsure at all n locations
gcgggcacttggactgcaaccatgccgaagcagattgaggagatcaaggagtttctcctcaccgccaggcgcaaggatgcccggtctgtgaagatcaagaagaccggcgatgtgaccaagttcaaggtccgctgctcacggtacctgtacaccctctgcgtgaccgactccgacaaggcagacaagctcaagcagtcgctgccgcccggcctgcatgtgcaggagatctgagaagtggagtcgttgtagcagtgatgagtagcgcatgcagcagacggccggaggttgcagcgcgcccagctgtcgccacctgtgtgtagcagcctgctgggcggggtgtgcagcaaggccaccgggtangagcagcagcggtggcttgcggagcgatgctgtaacaaggtgaccacac

SEQ ID NO: 463 - DNA, 380 bp, Chlorella vulgaris
gtccaaggaggccaaggccatggctgcggccaatgccagcaagggcaagaagaagaagtggtcaaagggcaagatgaaggagaaggtcaacaatatggtcaagttcgacaaggccacatatgagaagctgttgacagaggtgcccaagtacaagatgatcactccctctgtgctctctgacaggctcaggatcaacggcagccttgcccgtgccgccatcaaggagctccttggccagggtctcatcaaggttgtggccaaaagcgcaagccaggagatctacactcgagccaccgctgctgcatgattgactgaatgtttgaaggggcagctgtgttggaaggcttggcagatcccgatgtaaatgcagaagccccggc

SEQ ID NO: 464 - DNA, 345 bp, Chlorella vulgaris
acgcgtccaggacaatcaagcgctaccgccagattgaggtcatccatgcccgctgggccatgcttggcgccctgggctgcatcttgcacgaggtcctgcagaggtacagcggcatcgagttcggcgacgctgtgtggttcaaggctggcgcgcagatcttctctgacgacggcctgaagtacctgagcaacactgccttcatccacgcccagtccatcattgccagcctcatcagccaggtggtactgatgggcgccgttgagggctaccgcaccaactgcgtcggctcggagtgggccgagggcctttacagcctgtgccccgccggctgactactttgacccc

SEQ ID NO: 465 - DNA, 399 bp, Chlorella vulgaris
gcaagtctttctgcaccatggcgtttgcgatgaagtctcaggtcagcgtgcagaaggcttccttcgcgaagccggccctcaaggcctcctgctccaagcgggtggcaatggctcgccccgtgagctgctctgctcagaatgagaaggccaccgccgtggttgccgccgctctggccgttgcccttggctttggccaggttgacgctgcctatgccgacgttgcaggcctgaccccatgcgcggagagcaaggccttcgccaagcgcgagaagaatgaggtcaagctgctgacaaagcgcttgaagcagtatgaggccgactctgcgcccgccctgaccctccaagccaccattgacaaaacccatgcccgctttgagaagtacgccaagcaaggcctgc

SEQ ID NO: 466 - DNA, 395 bp, Chlorella vulgaris
tgcaagcagtacgagcagtcaggtcggcctggactcatagggtccgcgcttcccttctcagtccatacccacgtccaaccggaaagcaggcaggatggcggatctggcggccataggcgctttggggctggctggcatgtggcagggagtggcagtgctaaactccgtgggcttcccagtgccctactatcactccaaggaggaggaccccaaggagctgctccgtgagtggaggcgcatgttccttccaaccgcaaagatgcaggctggcctggcgactcttggcgccctggctgccggttacaccgcctacctgcagaactctgccgggaatgcagacatcaccgccgcctttggcacggcggctgcttgtgatgttgcgatctgggcgtaca

SEQ ID NO: 467 - DNA, 382 bp, Chlorella vulgaris
cccacgcgtccgcggacgcgtgggcttcgccaaggcccctgtggccacccgcaccgctggtgccaggcccgcacgcaccgttgccgtggtgtgccgcgcgcagcagcagcagaaggccgcagcagccctggccgccgtgcccgccctgctggccgcaagccctgcctttgctctggttgatgaccgcattgccactgagggcactggactggctctcggcgtccatgaccccgccctgttctttgccattgccattgtcttcaccggtgtgtgggcaatgttctactctggggccaagagcctgagcggcggcaagggcgatgactctggcctgaccctctgagcgcagagttggtaaccccttgtgttgcttgtgcagttt

SEQ ID NO: 468 - DNA, 428 bp, Chlorella vulgaris
acggacgcgtgggcggacgcgtggggtcggagcggctggcaacatggcgaccgagattaagttgttcggcaagtggagcttcgatgaggtggaggtgaacgacatctcccttgaggactacattgccgtgaagcccaagtatgcgcgcttcaccccccactctgccggccgtttccagaagcgccgcttcaggaaggcgcagtgccccattgtcgagaggctgaccaactctctgatgatgcacgggcgcaacaacggcaagaagctgatggcggtacgcatcgtcaagcacacctttgacatcatcaacctgctcaccgaccagaaccccatccaggtcctggtggacgccatcatcaacggtggtccgcgtgaggatgccacccgcattggctccgccggtgtggtgcgccgccaggctgttgatg

SEQ ID NO: 469 - DNA, 420 bp, Chlorella vulgaris
ccgcaagaaggcgcccacagccaaggacgcaaagtcggccaccgcagttaaccaggcgatccgagcaggcgcccaggtggagacgttaaagaaatttgatgcgggcagcaataagcacggcgcgggtcccatcaagcatgcgaccaagcttgaacaggaaacacatgtgtttgagcacgagcatgtgtcaactgagctgaagaagcatatccagcaggctaggatagcatagaagctcacgcacgcgcagttagcacaacttatcaatgagaagccccagatcatacacgaatatgagatcggacaagcattcgcaatccgcagatcttgtccaagatgtcacgggtgctgggcgtgacgctaatgaagaaccccggcaagaagtatggcgaacctggctggtactgtgctgcaaatttt

SEQ ID NO: 470 - DNA, 436 bp, Chlorella vulgaris
cccacgcgtccgcccacgcgtccgcccacgcgtccgcccacgcgtccgcccagttctggctctacctggccattttccatgttggcctattcgccaccatgtgagtgcctaaggttttgtttaaggaagggcggatgcgcaggggatgtagcccagttgcggaatgtaccaggtgcttgcctctatggggaggagcagcctttgcgaagcagtgatgcaagggtggggcgcatgtcactgactttgtggactctttcaccccgcaacttccttttttacctggccaggtggcttaggttggggatgtgggactaggtgtttgagggctatattgccggctgcagtacattcccatgcaacggcaaccccctcgtccctgacattcgaccatcgtgtgtgcaggttctttggtctgattggcgtcaacgctcgcatg

SEQ ID NO: 471 - DNA, 349 bp, Chlorella vulgaris
  unsure (1)..(349): unsure at all n locations
cccacgcgtccgcccacgcgtccggaggaggcggaggcgtacgttgccgaggcgctggccctggccatgtcgcgggacggctcctccggcggcgtcatccgcttagtcaccgtcaacaaggacggcgcacacaggaggttgataaagccacaggagcaccccactttctgggatgagctgccggagcctgccggcatggtggtgtgaagcatttgcgtccgtgcagtggtggaagctgtgggggtgagctcccggtangcggcgaggttgcatcgcagtacgttggcgggaccggcggcagggcacccattgaaaagtgctgtaccgcgtcattgctagctgtgggact

SEQ ID NO: 472 - DNA, 196 bp, Chlorella vulgaris
ggccgacccacgcagtcagactagttctaggttgacagggttgagcaggtggaggacgtcgaggataacgtcagtgacaatgtcagtgacaacgaggatgcacaggaaggcaaggagggcaaccccaggggcaacacgacccgccctaaaaggaggttcagaaagcttttgaacaacccgagtttcagccatttcc

SEQ ID NO: 473 - DNA, 366 bp, Chlorella vulgaris
cccacgcgtccgcccacgcgtccggttccggggcggccctgaagtggacaaggaggtcatcgaaaagtttggcaaggactgtgaggcactctccgaaggcaagtacgacagctggcaggagcagccttacaactgccttgcgggcatcctcattggagatcagctgacccgcaacgtgtaccgcgactcgccaaagatgtatgtgaatgacgaccgagttctggcgtgggccaaggcccttgtggcatctggcgctgataagaactacaagcccattgagcgagtgtggatctacatgccgtacatgcatcacgaggatgtgacagaccaggaggagtgcatgcgactgtttgagggcctcggtga

SEQ ID NO: 474 - DNA, 385 bp, Chlorella vulgaris
tgcatacacctccaaaatcgaaaagtaaggattaacgttagctcgggcaccatgtctgatcagaagattatcaaggccaagttaagaaagctgttaaagagtgtggatattgatagcgccacccagcggtccatccagaaacagttggagcacgagcttggagtgaatctggacgctcacaaacaactcatcaaggaggagattgatgcgtttctactggctgaagagggcggcagtggagatgatgtcgagcctgaggcgcacgaggcagagggccagcagccagcgaagaaaaagcagcggcaggcctcaggctccgcagccgcggccggcgacggcccgccgggcgggtacctgctgcagctgtctgacaagcgctttgtca

SEQ ID NO: 475 - DNA, 349 bp, Chlorella vulgaris
gtgagcagcaggggggctgccacaatgaaacagctagtctcttcccgcaccatcgacatcccttcgggggtggagattgaagtcaaagcgcgtaaggtccgcgtcaagggccctcgtggcaccctgacccgcgacttcaagcacctggcggtggacatgttcctgtccgaagatgaaggcgtgaaaaagcttaacgtggactgccactttggcaagcgcaaaagcctggcagctatccgcaaagccacctcccacgtgcagaacctgatcactggcgtgaccaaaggctacgagtacaagatgcccctggtgtaaggccaatttcccaatcaacatcaacatccaagat

SEQ ID NO: 476 - DNA, 388 bp, Chlorella vulgaris
acggaaacgtgggcggacgcgtgggcggacgcgtggggtgcaaaatggcgagcaaggtgtccggcgaggtgctgcgtgagggtatcgctggggtgctggagggctccaagtccaaggcccgcaagttcacggagaccgtggagctccagattggcctgaagaattatgacccccagaaggacaagcgtttcagcggctctgtgaagccgccttactgcccccgtccccacctgaaggtgtgcctgctgggtgaccacaagcactgcgaggaggcccagaacgcgggcattgacgcgatgagcgtggatgacctcaagaagctgaacaagagcaagaagctggtcaagaagctggccaagcagtatgccgccttcctgtcctctgacag

SEQ ID NO: 477 - DNA, 427 bp, Chlorella vulgaris
accaagcgtccggctacccgggcttcaaccccctgaacctcttcgctgagggcgacgctgtctttgacggccggaccagggagatcaagaacggccgcctggccatggttgccttcttcggcattgtttgccagcacgcagccaccggcgccacccccctggaggctctgaaggcacaccttgcctcccccctgaccgccaacttcgccaccaacggcgtgtccctccccttctaagctgcttctactcccccattggacggatgtctgctgctgtggcggcggtttaactggaaggctgaagggcgtgctaggcacttggcatagcttgcaattttgaggttgccaggatgccagtgcagcccgcaggttaggttgtacggatgaggttgtgcttgtacgctggtggtgctgctgctcaacacacg

SEQ ID NO: 478 - DNA, 412 bp, Chlorella vulgaris
gcgtcgaaattgtttcattgttgatagatgcgcaaggaaaggcccgtcgtgcactgctgagctgcctcttcatgtcatcaccgttagatgctagcgcagcagccacacaactaaacaagagcaaccgatacaaagagttgtttcgaccatatggaaaaataactaatggggtggaactcgccggctaagcctcctttctcgccgggtgtgaaagttcacaccgattcaagggtaaatgtacagacccaagtgcaggtttaaagagtgctcccagagaagcaacccgaggatgcggaccctgcaaaccgtacttggcttgaaaaggcggtgactgggccggggtcagcaatagctctggccttcatctgcaacaaggcgcttatgcctgtgcggctttctataaccatagcct

SEQ ID NO: 479 - DNA, 383 bp, Chlorella vulgaris
agctgctcgtagcaaggcaaaggcgctgttgaatgaatgtctcgcttgctcgctctcttgctcggaggcattgctagtgagggaccagggtgggtgagggggcggcccgttcccttgcgcaccctgcgacgctgtttatgcttttcatggctgtacagaggcacttggcagttcctacggcacgcattgattggtgttcaaattggctgggagccggtactagggcgcacacatattctgaggagctgggttttagtgagagaccgttggtcggccgagtgtctgtcttccgcgcatgcattttccatctctcaagctttgaacaacgtgcagccgccgagcctttgcagcgggtaggcctgacttgttgcagcagcagcagc

SEQ ID NO: 480 - DNA, 439 bp, Chlorella vulgaris
acggacgcgtggggtgcaaaatggcgagcaaggtgtccggcgaggtgctgcgtgagggtatcgctggggtgctggagggctccaagtccaaggcccgcaagttcacggagaccgtggagctccagattggcctgaagaatttatgaccccacaaggacaagcgtttcagcggctctgtgaagctgccttactgcccccgtccccacctgaaggtgtgcgtgctgggtgaccacaagcactgcgaagaggcccataacgcgggcattgacgcgatgagcgtggatgacctcaagaagctgaacaagaacaagaagctggtcaagaagctgggcaagcagtatgccgccttcctgtcctctgacagcgtgattaagcagatcccgcgtctgctgggccccggcctgaacaaagcgggcaagttccccaacctcatcaccca

SEQ ID NO: 481 - DNA, 439 bp, Chlorella vulgaris
accatgggctcgccgggggcgggagcccatggacatcaacaccgccatccagctggtgctcaagaaggcgctggctcacgacggcctcgcacgcggcctgcacgaggcctgcagggccattgagcgcggccaggcgcagctgtgcatcctcgccgacgactgcaaccagcccgactacaagaagctgattgaggccctgtgcgccgagcagagcgtcaacctcattgccgtgcccgaccccaagaccctgggccagtgggcaggcctgtgcaagattgacagcgagggcgaggcgcgcaaggtggtcggctgctcgtgcgccgtggtcaccgactacggcgaggagactgagggcctggcggtgctgcaggagtacctgaagagccgctgagcgcatgctgtgctgggcatgctgtgcactcgcccagggcacgcgctg

SEQ ID NO: 482 - DNA, 386 bp, Chlorella vulgaris
cggacgcgtggggctggggcgcagtgcaggcaactcgctgggcgtgctgggcctgttctttgccagcttcgagagcctgctgggtcacttggcagatggccaggttccagacgaagcagtgaccgttggagcaggcgcggcaacgggggcgcttttccgcagcgtgcgggggccacggcaagcactggtggcgggagccctgggcagcgtggggggcgggctgctagtggcggcgcgaacctacatcaaccgcggcctttagtctagtctggtctagcagcgtaccgccacctgaccatgctgccgtgagtctcccaagcggcctttgaaagtgatatatagttctgcacttggttttgaggccctttaccggctggaggcctatg

SEQ ID NO: 483 - DNA, 430 bp, Chlorella vulgaris
gtgaagaccaccgacaccagccagtggtacggtcccgaccgccccaagttcctgggccccttctccgagggtgctgtgccttcctacctgaacggcgagttcgctggtgactacggctgggacaccgccggcctgtccgccgaccccgagaccttcaagcgctaccgccagattgaggtcatccatgcccgctgggccatgcttggcgccctgggctgcatcttgcccgaggtcctgcagaggtacagcggcatcgagttcggcgaggctgtgtggttcaaggctggcgctcagatcttctctgacgacggcctgaactacctgggcaaccctgccctcatccacgcccagtccatcattgccaccctcatcacccaggtggtgctgatgggcgccgttgagggctaccgcaccaacggcggcggctggg

SEQ ID NO: 484 - DNA, 354 bp, Chlorella vulgaris
cccacgcgtccgctgactgtttgtcggattcctccgtacagttttcactcaagcaatatgtcatccagatcaagtctgtaattccctgcatagataccggcctaatcgtgactgtcgatggcgaaaatttattggtggaatcactaacagaatctctggtactgttaggaggcaagcagatcctcagaggaaaggcagtaatggcaatgggaaaggcaaattaacccatcagactgaattgtttataaagataatgttgagtgatcagcatgcacttactgcacaccatgggtgatatgactattgggcggggggataacacagtcttgacacacaacttcgacgagaatgttt

SEQ ID NO: 485 - DNA, 387 bp, Chlorella vulgaris
agccggtgggaagggcttgtcttccgcaaggcaaaatgccgtccaaagggttttaacgcaactatgggaagaccttcaaaaaagcccggggccccttccaaaaagaacggctggatgcccaacttaaaaacgttggcgaataagggctgggccacaatcgccaactccgggcttttcaaaatgggctggtcaaacctgccctcaagggccgggtccctgctaaccctggatcgagaaggacccaaagcgccttttttgagggtgacggccctcatgcgccgcatgtaccgctacggcttcctggacgagacccagaacaagctcgattacgtgctggcgctcaaccctaccgacgtgctggagcgccgcctgcagaccctggtgttc

SEQ ID NO: 486 - DNA, 412 bp, Chlorella vulgaris
acacagccagtcgactcggagcaccatggcagcgatggcttccctgaccgccaggaccgccttcgtgggcaagacccactcccagccccgccaggcggcgaggaggagcagcgtggttgtggctgccagcaggcccatctggtaccctggcaacgatgaggtggtgcccccttacctcgacggcgagctgccaggcgactacggctttgaccccctgcgcctggctgacgaccccgagaaccgcaggtggttggtccactccgagatcttccacggccgcgtggccatgaccggcgttgcgggcatcctgtacacctcgctggccaatgcctccggccaggacatccccgagtggtttgatgccggcaaggtgtacgctgagacccaccccgatgtgccctttggcgccctg

SEQ ID NO: 487 - DNA, 431 bp, Chlorella vulgaris
  unsure (1)..(431): unsure at all n locations
actggatgcctggttagccggtcccatgttgtttggtggaccattcccgagaagaactttcanacgcctgcctcttatgttcccgcatatgatgctcccctggccagagggcgtcacgatcaatgggcagcaacgcccatgtacccccctgcagcccagagatgacaggttgaacgcatgcccgcgctaccgctgtgccctccctgtttcatgattggcagacagctgcacttgggatacgtgagcactgtagcaacaattttgctggttgtgtgtagtaacccttgctgtgtgccccaacgtgctgcacacacctgattgtcttttctttggtggctcaaggcatgatatgccatgcccagccgtatgtattccaacactgacccttttatggtatgtgagtgatatagactccctgccgtgcctccaca

SEQ ID NO: 488 - DNA, 442 bp, Chlorella vulgaris
ctgcttaggcgttcttggcaccatggctgagaagtcatgcacgatcaggacacgaaagttcatgaccaaccgcctgctgcagcggaggcagtttatccttgatgtgctgcaccctggccgtgccaatgtctccaagactgagctgcgcgagaagctgtccaagatgtacgacgtcaaggactccaactgcgtgtttgtctttggcctgaagacccagtttggtggcggcaagtccacagggtttggcctcatctacgacaacgtccagggggccaagcagttcgagcccaagtacaggctcatcaggaacggtctggcgcagccggtgcagaagtcgcgcaagcagcagaaggagcgcaagaaccgcaccaagaccatccgcggtgtcaagaagaacgcagtggccggcaagaagtgagcgggcagcagcatgcagccctga

SEQ ID NO: 489 - DNA, 409 bp, Chlorella vulgaris
cccacgcgtccgcccacgcgtccgcatagaccttattcaagaactcaatagcaacgtggccaaggtggtggagctgtacaacggcatttcggctgagttccagcagtacatggacaagcggaagcaggagggctccctacccggctagctagatgctgcacgagagttgggtggttatgtacaacctccgcccacaggttgggtagggttcctcctcccttccctcctgccccaccctcggcttcctggaagacaagggcctgcaagctgtgtgctagcacagctggatgcagccgtgagctggagttcagtactggcaatgggatccatacttaggccagcggaagggaaagcataccttgtttgcacaaacaactgcatgaggcacaagtacgggcgctgagtgctg

SEQ ID NO: 490 - DNA, 409 bp, Chlorella vulgaris
  unsure (1)..(409): unsure at all n locations
atcgatcttctcgtctgacttgcacatccgagctcgctgccttgcttggtggccaacctgggcgccatgctgcagcaaatagcgggcagggtggcacccaagctgctggcagcgccaccactatcgttcgtgtccttgattaacgggttccaaaccagcccggcagcacaaggcgtgggcatccctgagcgcaagcttgacagcctcgaccccgagcagccggccatgagcgagcaggagttccagacgtcgcagcgcgagcctcccaaagacctgncgggcatgctggatgagtcagcccagacgctgttcctaacagagctgttggcggggctggccctcaccatgaaagtgttctgggagcccaaggtcaccatcaactacccgtttgaaaaggccccatcagccc

SEQ ID NO: 491 - DNA, 394 bp, Chlorella vulgaris
cccacgcgtccgctgcctgtttgtggggttcccccttaaagtttgcattcaggcaccaaccaaaaatgtccaagtctgagcttgcctgcgtatacgccgccctgatcctggcggatgagggtgccgatgtcagcgccgacaacatcaccgcaatcgtgaaggctgcgggtgtggatgttgagccctactggcccggcctgtttgccaagctggccgagaagaagcgcatcgaggacttcatcgtgaacgttggcgccggtggcggcgctgcccctgctgcgggcggtgctgcacctgctgccggcggtgccgctgatgcccgccccgccgccaaggaggatgagaacgttgaggatgaggaggaggaggacatgggcttctccctgttcgacta

SEQ ID NO: 492 - DNA, 384 bp, Chlorella vulgaris
cggacgcgtgggcggacgcgtgggcggacgcgtgggccagggtaacccatcagcagggattgaaggccaagaacaatggtcaggcacaacaacgtggtgcccaaccagcacttcaggaagaagtggcaggacaaagtcaggacctggttcaaccagcccgctcgcaagctccggaggaggaatgcccgcgccgagaaggccaagaaggtgttcccccgccccaccgcgggcgcgctgaggcccatcgtgcacggccagaccgtcaagtataacatgaagaagcgcgcgggccgcggcttcacgctggaggagctcaaggaggctggcattccctccaagcttgcccccaccattggcattgcagtggaccaccgccgcaagaac

SEQ ID NO: 493 - DNA, 448 bp, Chlorella vulgaris
  unsure (1)..(448): unsure at all n locations
acgcgtccgcacacgaatccgcccacgcgtccgtgcagccccgatggccaccaagcaactctttaggcgacccctgatggngtcctcgcatgccgtgttgcccagatctcacaacctgttgacaaactgcgcagcanaaagcgatcgtgccagttgcccttgcacttgcgcggctagcaggcggcaggctttgctggccatagttgcaggttccgtcgcgctgcttgagaaggctagctgggcccaaggggccgcaggcgaccctgctgctgccccagttccaccaccagcgaacagtgctggaaaggactctgccgccgccggcagtgcacaacagcagctgcaacaacaacagcaacagtcgcttaaacaaccgccgcagcagccaccctcacaagcgcagcagcagcccccacaggcgcagccaacaacggcccagcagaagcag

SEQ ID NO: 494 - DNA, 378 bp, Chlorella vulgaris
atgagcgaacaaggtgtccggcgaggtgctgcgtgagggtatcgctggggtgctggagggctccaagtccaaggcccgcaagttcacggagaccgtggagctccagattggcctgaagaattatgacccccagaaagacaagcgtttcagcggctctgtgaagctgccttactgcccccgtccccacctgaaggtgtgcgtgctgggtgaccacaagcactgcgaggaggcccagaacgcgggcattgacgcgatgagcgtggatgacctcaagaagctgaacaagaacaagaagctggtcaagaagctggccaagcagtatgccgccttcctgtcctctgacagcgtgatcaagcagatcccgcgtctgctgggccc

SEQ ID NO: 495 - DNA, 440 bp, Chlorella vulgaris
cacgcgtccgccgtcgacaacaggtccaaggttcacaagatgcagaccctctctgcccgtttcggcgtccgcgcccctgtctcccggggcacccgccaggtgacccgcgcctccgtggagtggtacggccccgaccgcgccaagttcctgggccccttcaccaaccccccttcctacctgaagggtgagttcgctggcgactacggctgggacacctctggcctgtccgccgatcccgagaccttctcccgctacagggaggttgaggtgatccatgcccggtgggccatgcttggcgcccttggctgcgtcgtgcccgagctgctggaccgcaacggcaccgtcaactttggcgagaacgccgtgtggttcaaggccggtgccgccatcttcggcgatgacgggctgaactacctgggcaaaccctccctcatccacgc

SEQ ID NO: 496 - DNA, 390 bp, Chlorella vulgaris
  unsure (1)..(390): unsure at all n locations
cggggccacccacgcgtccggacaagcccgcctcccagggtatcacccagctgaagcccactcgcaacctgcgcaatgtggcggaggagcgtgtcggccgcaagtgcggcggcctgcgtgtgctcaactcctactgggtaaaccaggacgctgtgtacaagtactttgaggtcatcctggtggaccccgcccaaaaggccatccgcaccgacgcgcgcgtcaactggatctgcaaccccgtgcacaagcaccgcgagcagcgcgggctgaccagcgccggcaagaagtaccgcggcctgcgcggcaagggccacctcaaccacaaggcccgcccctcgcgccgcgctgtctggcgcangaacaaacgcgtctcgctgcgccgctaccgct

SEQ ID NO: 497 - DNA, 331 bp, Chlorella vulgaris
gtccacccacgcgaccggcatcgatgctgagttcactgacaagcagtgagcggtgtctgtaatcaagtgcagggctgcctaggaaagtgcaacagtggcagtggccactgggctgctttcagagtgagtagttgtgttttgttggctggatcgatgcctcctttaatcactccttgggatagtcggcctccttgcgttgtgcctcagatgcaaggcctggctaagctaggcatgcatggaggggttgagtgtaatgggcgggtggctacctagccagcatggaggtaggttcttgccttaaaaccatgcttcggctttcgtttgtgctgtg

SEQ ID NO: 498 - DNA, 342 bp, Chlorella vulgaris
ggggccagccacgcgtccgcattcagcaaaagatccacgatgcagaccgcctttgtccgctccggcctccgtgccgccgtccccaccgctggcaagggcacccgccaggtgacccgcgcctctgtggagtggtacggccctgaccgcgccaagttcctgggtcccttcaccaaccccccctcttacctgaagggtgagttcgctggcgactacggctgggacacctctggcctgtccgctgatcccgagaccttctcccgctacagggaggttgaggtgatccatgcccggtgggccatgcttggcgccctgggctgcgtcgtgcccgagctgctggaccgc

SEQ ID NO: 499 - DNA, 404 bp, Chlorella vulgaris
acgcgaccggcaactacagctgcagtgttgggtatatcgtgcctttccagactaggtgatgatttgtaggcacgatgtgcggcagggagctgtagtgtgtctcaccctgctttaaagcgagttccttgtctcataaaacagcctgaaggagcaactgagcttttgtcttcgctggctgcagagttgccagatggagtttcgactaggaggcacaggagctgggctttttgtcgggtgcggctgcggtgtggggttcatcactccactgtcgctgcactctatacctgtgctagggcagctggcatcaagcctgtctggcagcctaggcagcctggacgcctcattggggggccttggcagcagtgcccgtcggcgggtgcgatcgctgggcattcgaggtcttg

SEQ ID NO: 500 - DNA, 398 bp, Chlorella vulgaris
ggggccacccacgcgtacgtacaaaatggcgagcaaggtgtccggcgaggtgctgcgtgagggtatcgctggggtgctggagggctccaagtccaaggcccgcaagttcacggagaccgtggagctccagattggcctgaagaattatgacccccagaaggacaagcgtttcagcggctctgtgaagctgccttactgcccccgtccccacctgaaggtgtgcgtgctgggtgaccacaagcactgcgaggaggcccagaacgcgggcattgacgcgatgagcgtggatgacctcaagaagctgaacaagaacaagaagctggtcaagaagctggccaagcagtatgccgccttcctgtcctctgacagcgtgatcaagcagatcccgcgtctgctgg

SEQ ID NO: 501 - DNA, 399 bp, Chlorella vulgaris
ccacccacgcgtacgcacacgcgtccggtgccaccaaagccgccagaatgcagaccaccttcgtgggcaccacccaggcgctgcgcgccaaggtctccacccaggccactcgtggctccaaggtagcaacctccatgcgccgcaccgtcaagtccaagaacgtgaagaccaccgacaccagccagtggtacggtcccgaccgccccaagttcctgggccccttctccgagggtgctgtgccttcctacctgaacggcgagttcgctggtgactacggctgggacaccgccggcctgtccgccgaccccgagaccttcaagcgctaccgccagattgaggtcatccatgcccgctgggccatgcttggcgccctgggctgcatcttgcccgaggtcctgc

SEQ ID NO: 502 - DNA, 136 bp, Chlorella vulgaris
cccacgcgtccggatgaaaaaaaaaaaaaaaaaaaaaaaaaaaaaaaaaaaaaaaaaaaaaaaaaaaaaaaaaaaagaaaaaaaacaaaaataaaaaaagacggaaacaaaaaagcgtaaaaaaacgccgtacaaa

SEQ ID NO: 503 - DNA, 198 bp, Chlorella vulgaris
gtttcacttctactcgtcatcggttctcatactgtttcaaggcggggcgacatacctcggatgaccccaacgtgcgtgtgcgctttgtacactttgcacacacattcaaactggagccgtcgctgcagcagcgggatcacaacttcctgtccggcctgcgggccatcaccggcaagctgtctggcatcctgctggcac

SEQ ID NO: 504 - DNA, 94 bp, Chlorella vulgaris
ttcccgggtccatccaggacttgtcatcgccgccaggaggcctcttcgagccctgcctggctatcccacttaggacaagatgccgcctaagcgt

SEQ ID NO: 505 - DNA, 442 bp, Chlorella vulgaris
  unsure (1)..(442): unsure at all n locations
gtccaccgacgcgtccgcacacgcatccgcccacgcgtccggctatcaaagtcatctgactccgatcttgcctcgagtaccgccaccatggtgctcaagtccgccctcctcgcctgcctggtgctcatgactgggctgggctgttcccagcatgatgctgacggttccctggggcgcaagatgttggctgtcgctcagtccacagccaccgccaaagcagccaacggtggagtggccaacgccaatgccaactctgttgccaccggcaatggtgttgctctgtccaatgccaatgccaacgctgtgggccccggtgccattgccaactctcaggccaacgccgctgcgcctggccacggccttgccactgccaactcccaagccaacgccgccaccctgngtggtggcattgcagctgctaacgccaagccaacgcactgac

SEQ ID NO: 506 - DNA, 373 bp, Chlorella vulgaris
  unsure (1)..(373): unsure at all n locations
ggggccaccacgcgtccgcatgagtgtgctgacagcagcgcagcacagcaggccagcgagccagctgcacagtgcttgctaaggctaggcagcgagttgcactgtgtgacttctaccgcctgcagcccccgctcggtgactctgatactgaggatgtccttgccgcccactggtgggctcctggcaccgggcgcagcatgtttgtggatgaggggtatgccgtgagtctgcgcagcgtagacaccaagctggtgatgctgcaagggcaccancgggccggtgggatgcacgtgtatgtggtgagctaatcatgatgcctagccgtgatggggtgtcgttcgcctgtgaactgctgggcttgatgtgggtgctg

SEQ ID NO: 507 - DNA, 326 bp, Chlorella vulgaris
cacgcgtccgcatcaaggcgctcaaggagccgcccagggacaggaagaaggagaagaacatcaagcacagcggcaacctgtcaatcgatgacgtgatcgagattgcgcgcatcatgcgcaaccgcagctgcgccgcctcgtttgccggcagcgtcaaggagatcctgggcacctgcgtcagcgtgggctgcaccgttgagcacgaggacccccgcgaaatccagtcaaagattgacgatggcgaggttgaggtgcccgaggagtgaagctggaagtaccgcccggacccgtgttcgtttcagctgccatgtaacagccgctcgcag

SEQ ID NO: 508 - DNA, 229 bp, Chlorella vulgaris
  unsure (1)..(229): unsure at all n locations
cggggccancacgcgtccgaattcatcaagaacatgatctccggtgccgcccaggccgacgtgtgcctgctcatggggcccgccgacggtaacttcaccaccgccatccagaagggtgaccacaaggccggggagatccacggccaaacccgccagcatgctcgcctcatcaacctgctgggcgtgaagcagctcatcgtgggcgtgaacaaaatggattctgacactg

SEQ ID NO: 509 - DNA, 388 bp, Chlorella vulgaris
ggggtggttggtggagaccctgcccatcagcagccatgggtatctcccgcgactcgcttcataagcgccgggcgacgggaggcaagcagaaggcttggcgtaagaagaggaagtatgagctcggccgccagcccgccatgaccaagctgtcctccaacgtgacagtgaggcgtgtgcgcgtgcgcggaggcaactctaagttcagggcgctgcgcctcgactcgggcaacttctcctggggctccgaggccgtgacccgcaagacccgtatcctggatgtgtcttacaacgcctccaacaacgagctggtgcgcacccagaccctggtcaagaacgccatcatccaaggtggacgcaacccccttcaagcagtggttacaggtgcact

SEQ ID NO: 510 - DNA, 356 bp, Chlorella vulgaris
  unsure (1)..(356): unsure at all n locations
ccgggtcgcatcagacgtcgcatgggcggacgcgtgggcatcaacgaggtcatccagaaggcagaccgcatggcagcggagctagcgggcaaggcatgagcataattgagacggaggagtaaccatggtggaggcaatgttgcagccaagtcaaccggcgcaagggtgcccctgggacggggtctggagcgcaacagccggggcatctgcgctgaggttgtanccgttggcctgtggcctggtaggtgcagattagtgctgcttggcagcatggtcactgctggtgctgtctttgcaatgcatgcggcagaatgttgtangagaattgctttttgtgcgctgggcgcgtttggggt

SEQ ID NO: 511 - DNA, 399 bp, Chlorella vulgaris
cggggccagccacgcgtccgcaggatggctgcccttcagcgcgcctttgcgggcctgaggtctgcagtgctcagcaggatgggcatggccgctagcagccagcagctatggcgaggatttgccacagcctcttatctggacaaaaatgaggttacagaccgcgtgctcaattgtgtgaagaatttcgagaaggtggagcccagcaaggtcaactcctcggcctctttccagaaagaccttggcttggacagtctggacactgtggagctggttatggcactggaagaggagtttgctatcgagatccctgacagcgaggcagacaaaatcttgtcctgcagcgacgccatcagctacattgcagcacaccccatggccaagtgagagccctgcagctga

SEQ ID NO: 512 - DNA, 276 bp, Chlorella vulgaris
cacgcgtccgcacacacgtccgcggacgcgtgggcggacgcgtggggtacgtgtaagccctcttcaagaagcttggcggcggtgtccccgctaaggcaaccaaaaagggcgccggtgcaaccatgaaagccgttggcaaagccaagaaggtcacctctggcaacatcaatggttggtggctgggcactgacagcatcaacatcgacctgtacaggtggtacaagcctgaccgcgccctgtacctgcacggtggcctgctggaacgctctgaagtgc

SEQ ID NO: 513 - DNA, 406 bp, Chlorella vulgaris
  unsure (1)..(406): unsure at all n locations
cttggctggtaaaaggaaagccaagggtgaccaggtagtgagagtgccaccaaagccgccagaatgcagaccaccttcgtgggcaccacccaggcgctgcgcgccaaggtctccacccaggccactcgtggctccaaggtagcaacctccatgcgccgcaccgtcaagtccaagaacgtgaagaccaccgacaccagccagtggtacggtcccgaccgccccaagttcctgggccccttctccgagggtgctgtgccttcctacctgaacggcgagttcgctggtgactacggctgggacaccgccggcctgtccgccgaccccgagaccttcaagcgctaccgccagattgaggtcatccatgcccgctgggccatgcttggcgccctgngctgcatcttgcccg

SEQ ID NO: 514 - DNA, 257 bp, Chlorella vulgaris
  unsure (1)..(257): unsure at all n locations
cccacgcgtccggagctgcatgncaattcctggacctactaagtgctgcctggcaattcctggacctactaagagcaaagataattccgttcaatggttgattcgccatgaaccgttgttgaccaacgattaagttttggtccttaacaacctcctggtggaatggaacttgcaaactaatggcttttggtttcaaggcaattaagttaggccgttgcgctccctcccaatttggaatggtaaggaatgccttgaat

SEQ ID NO: 515 - DNA, 207 bp, Chlorella vulgaris
gtctcacgataggtgctccctcagggtatccctaaggtgctggacggctccaagtccaatgcccgcaagttcacggataccgtggggctccatattggcctgaataattattacccggggactgacaaccgtttcagcggttctgtgaacctgccttactgcccccgtccccacctgaacgtgtacgtgctgggttaccacaatcac

SEQ ID NO: 516 - DNA, 414 bp, Chlorella vulgaris
ttcagggtccaccacgcgtccggagtgaggtgtacaagttcctcttcaaggagggtgtgctgtacgcggaaaaggacttcaacctgccggagcacccgagatttagggggtgtccaacctggaggtcatcaacctgatgcagtccatgaagagcaaagacttggtcagcgagcgctatgcctggcgccactactactggttcctgacggacgcgggcatcgagcacctgcgtgagtacctgaacttgcccagcgagattgtgcccgccacactgaagaaatcgaccaggcctctggagcgggagggcgcacgcccgccgcgcggcgacaggccgccccgccgcttcgacggcgagggccgcggcggctaccgctctgccgagggcaagactggtgcccctggcgagtatcgccc

SEQ ID NO: 517 - DNA, 390 bp, Chlorella vulgaris
accgacgcgtccgcacacgcatccggcggcagcagcgcttgcctcctgttcagctcagcagcccccgccccctgcctctcttggcttgctacgggctggccagcccagcaggcgtctctgcacagcggcagccggtaagtccattgggcccagcagacaccacaattgggccctccgccaaagtgggcagcagggagcacggagcggtggccctggatatgcctgagcacagcgcagcgggaggtatccggaagaaggatcagccggttggcaaagctacgctgttgggccgggagcaggatcagcagcaccagcccgctggcaagtactgtgttgggagtgagcaggtccgacgggcgcgggctccaccacagcctcaggcaccggggc

SEQ ID NO: 518 - DNA, 382 bp, Chlorella vulgaris
ggggccagccacgcgtccgaatgtctggaacctcttggtaacggtgtctacgttggcgctgtgcaataagatttaagtagattggtgttttgggcaagttgtgcaaggctgaccaggtggagaagcaggtgtgggacgaggtgatgtcggtcaacctcacgggcgcatacaactgctgcgcagccgcctatccttacatgaagcaggcggggaggggaaagatcatcctgctcagctccattgctgccctccgaggttttggagcacaggtgccatactgtgctagcaaaggtgccttgctgcccctggccaaatccctggctgtggcatggggcaaagataacattcaggtcaactgcctgctgcctggagctatcaacac

SEQ ID NO: 519 - DNA, 372 bp, Chlorella vulgaris
ggggcagccacgcgtccggaaccatagcagccatgaacagcttcgtgtctcactgcgaggccggcactgtgaccctaaagactgcccccaacgacccccgcttcccccttaccaaccagactagggcttgctatgtgtactataatgagctgcacaagtgcgtcgctgacaacggctccgataatgcccagtgctcagctctgaagaccaatgtcaggactttttgccctgatgagtgggttgcgcgttgggacgagatgcgtgacaatggcacttggtacggcaagtactgagctgggaggcgctgcaagcaccttccgcgcgccagcaaaaggggccccgcttcgttttaaaaccaagtgttggccaaac

SEQ ID NO: 520 - DNA, 365 bp, Chlorella vulgaris
  unsure (1)..(365): unsure at all n locations
gggtccagncacgcgtccgcacaagttgtaaaaaagcgtcgccatggcttcaaaaaggaagggcggcgttggtggcaacaagttcaggatgtcgctgggtttgccaatggccgcaacaatcaactgcgctgaaaactccggcgccaagaacctgtacatcatctccgtggccggctggggcgccaggctgaaccgcctgcccgccgccgcccccggcgacatggtgatggccaccgtgaagaagggcaagcctgacctccgcaagaaggtgcaccctgcggtggtggtgcggcagcgcaagtcctggaggcggaaggacggcacctacatctactttgaggacaatgcaggcgtcattgtgaacc

SEQ ID NO: 521 - DNA, 455 bp, Chlorella vulgaris
attcggcggtccacccacgcgaccgcagttgtgcaaaatggcgagcaaggtgtccggcgaggtgctgcgtgagggtatcgctggggtgctggagggctccaagtccaaggcccgcaagttcacggagaccgtggagctccagattggcctgaagaattatgacccccagaaggacaagcgtttcagcggctctgtgaagctgccttactgcccccgtccccacctgaaggtgtgcgtgctgggtgaccacaagcactgcgaggaggcccagaacgcgggcattgacgcgatgagcgtggatgacctcaagaagctgaacaagaacaagaagctggtcaagaagctggccaagcagtatgccgccttcctgtcctctgacagcgtgatcaagcagatcccgcgtctgctgggccccggcctgaacaaggccggcaagtttcccaacctcatcaccc

SEQ ID NO: 522 - DNA, 384 bp, Chlorella vulgaris
gggtccctagcttgggtttgcattctgttggtggtcgcaggcaaagcaacatgggttgaggtgttgtgtactggcaggacgggatgtattgatgccttgggacttgctattccagtagctttctccccatgtatgtgtgcaaggtcactgttagtgctaagagagagaaaaagaacagtaaaaaatattgtgtgggcaggctggaagctaggtctgccctgtggcttgtctctttccagtgtgccttatgctttgtcaaccagaaggcttgtagcatcttgtagctgacttcgtagggtcacccactggcagctgcataggagtacagccgcctgttgtattgctggctggttctgcaagcggcgctgtaagcaacctggctta

SEQ ID NO: 523 - DNA, 402 bp, Chlorella vulgaris
cacacgcgtccgagtagccgaggcctaggggcgaagggtgcttcttcactcagacacggctcctgccgatcgtctgaggaaccgtgcatcatgacttcgaagttccctgcacacgcaatcacaagggagcccgcgcggacgactatagtgaacagccttaaggagatgtggccctttgttgcgggcttctctctaactggctatatcttcacaaaggttgccctgtcagtgacagatgaggatgtgaagaactcaaagtttgccaaccccaagggccacagccactgagccctgaactggcaggcagctgggaagcagcgagcggcagtcctcgggggacagaccggtgtaggtgtacgcggtaatgcaacgctgcgcacggctcctccgttgcagcatact

SEQ ID NO: 524 - DNA, 440 bp, Chlorella vulgaris
tagccgtcgtaaattctagggtccaccgacccgtccgcacacgcgtccggaacggccgcctggctatgttctccatgttcggcttcttcatccaggcacttgtgaccggcaagtctcccctggagaacctggccgaccacctggctgaccccgcctccaacaacggcttctccatcctgaccgccaccaagttcaccccctgaattcagccctgaattttgagggaaatcccctggctgctgctagttcctcgttgttctagctcttggttggttgccggtgtgtcgctgttgtgtgaaggggagaggcgtgaccccttggttgtctactggcagcagcagcagcacccagcagctggacggtcgtattgagatgtgtgtgacgcggcaaaattcgtaacgcacgaggaaccgagaagagcacctttaattccccctgct

SEQ ID NO: 525 - DNA, 419 bp, Chlorella vulgaris
gggtccagccacgcgtccgcagacacgtggggtttcactatgtttgggaaggcaatggtatgttgagtgtatgactcacttggggtgtttttgtggccgtttaaggcaatcaacaagtatgcttggaattcacgcgtatctctgaaattctcggtagctaccgaggttacgagctgctgttgtatacttttctgtgcttgcaaaccatcattgcaatttccgggttttgcctcttacgtcgtgcttctctgctgctctgtcgcagctagttgtagtcttgcgtgtgccactgctatcttcttttgcctgagtgcatcattgctggttgggttgcacagatattggctgtcctttattggggtagtggtcactgtgaccggtgtttcattcccctactcatgagcgcaactgctggctgc

SEQ ID NO: 526 - DNA, 446 bp, Chlorella vulgaris
  unsure (1)..(446): unsure at all n locations
cacacgcatccggtggaatcccccgtcgacaacaggtccaaggttcacaagatgcagaccctctctgcccgtttcggcgtccgcgcccctgtctcccggggcacccgccaggtgacccgcgcctccgtggagtggtacggccccgaccgcgccaagttcctgggccccttcaccaaccccccttcctacctgaagggtgagttcgctggcgactacggctgggacacctctggcctgtccgccgatcccgagaccttctcccgctacagggaggttgaggtgatccatgcccggtgggccatgcttggcgcccttggctgcgtcgtgcccgagctgctggaccgcaacggcaccgtcaactttggcgagaacgccgtgtggttcaaggccggtgccgccatcttcggcgatgacgggctgaactacctgggcaanccctccctcat

SEQ ID NO: 527 - DNA, 424 bp, Chlorella vulgaris
  unsure (1)..(424): unsure at all n locations
tcagggtcaccaccgtcgcacaacaaccctactatcagctgctgacatcatcgccctttcgcaagcacaccagttttcccccaaggcaaaaagctttccttttaacaccgttgtgccccccaggcagccccgctactgangagaaaaagcctgggcgcctcccaacctgaaccccgccaccccctcgcccatcttcggtggcagcaccggcggtctactgaggaaggcgcaagaggaggagttccacgtgatcacctgggagtccaagaaggagcagatttttgagatgcccaccggcggcgctgccatcatgcgccagggccccaacctgctcaagctgtcccgcaaggagcagtgcatggccctactgacgcagctgcgcaacaagttcaagattaacggcttcatttaccgtgtgttcccc

SEQ ID NO: 528 - DNA, 420 bp, Chlorella vulgaris
gggtccagccacgcgtccggatctacgtttgccttcaagagcagggcagcccagaggcccagccgcagccccttcaaggtccaggcctacaaggtcaccttccgtgacgccgccaagggcaccgagaaaaccgtggagtgcggcgctgaggactacctgcttgacattgctgacgccaacaggattgacctgccagccagctgcaggggtggcgtgtgcggcagctgcgtgagcaagctggtgtcgggccagatcgacaacagctggcagtgcgaactggacgacggcaacgtgctttctgccgaacagatggcggccgggtggatcctgccctgctcaaccaagccccagtctgacctggtgatcgagtacagccaagggtggggcatccaagtcatcgagggctggaactcgcgtgcc

SEQ ID NO: 529 - DNA, 332 bp, Chlorella vulgaris
cggggccacgcacgcgtccgcattcaggacgagaatgtcagctacatatatgtccagcactccaacctgtatgtgctggccatcacccgcactaacgtgaacgcagcagccatcctggtgttcctacacaaactcatagagattttcaagcactacttccaggagttggaagaggagtccctgcaggacaacttcgtcattgcgtacgagctgttagacgaggttatggactttgggcaccctcagttcacagaagccaagatattgtctgagtacatcaagactgatgcctacaaaatggcggtacaggctcggccgcccatggctgtgac

SEQ ID NO: 530 - DNA, 445 bp, Chlorella vulgaris
  unsure (1)..(445): unsure at all n locations
ggcagcggccacagcagcgcagctggatgccgccatcgcccgcatgccccagggttggcagacagttgtgggagagcgggggctgaagctcagtggaggagagaagcagcgggtggccatcgctagagccttcctgcgggagccccgactgctggtctgcgacgaggcgacctcctctctggactccgccactgagcggtccatcatgggaagcctgcaggcgctggcagcgggccgcacctccgtctttgtggcacaccgcctgtccaccatccagggctgtgaccgtatttacgtgctggcggagggcggagtggtggaagaggggcgacatgaggagctaatggctcagcgtggcgtatattatgacatgtggcgcatgcaggaggcanagcaggccttggagggagcactgcatcaaacacctcatgaccctgacgacgag

SEQ ID NO: 531 - DNA, 264 bp, Chlorella vulgaris
agtataagttatcatccttcttatacaaccagcactggtattgttctctgcactgttcacgcgtccctgttgatgctctgtgcaccttgcccaaactgccgagtatgcagctttgtacctttgggagttaggacaggctgcggcctgcactgccgcttatctggcgcttccggcggggggcatgcaggctcggtgctcgcacgggctgccgccctggctttcgagaccgccgctccgcatgcaggctcgttggtgttccatacc

SEQ ID NO: 532 - DNA, 358 bp, Chlorella vulgaris
gacaagcatacgtagaaggattacaacagtaatgcacgcgcagccgctttcgggataggagggtctgtctcgcggggcagacgccatatgatccgagcatctgtggtgtagtatggccactgcagcaccagtttccagcgcacatacatcaaacacccttcctacgtgaaaggtaacttctctggctacaaatgcagggacagatctggcctgtacgacgatttcaacaacatctcacgctatagggacgttcaagtgatgtatacacggtgagctaagcttgctgacattgactgcttatttcacgacatgctagacagcaacggcaccgtcaactttggcgagaacgccgtgtggt

SEQ ID NO: 533 - DNA, 440 bp, Chlorella vulgaris
  unsure (1)..(440): unsure at all n locations
taaggtcccagggtcgacggacccgtccgcccacgcatccggctgggaggcgcagagattgcgttgtatctcaaaggcttgttcaatctgtttttcacaacataacctaaatctgctcgcccttcaaaccaggcatcatggggcgcacaggtatcgccgtgggccttacaagggccatgtggtcancangaaggaaaaggccgtgaggcccgctaaccgcaaggggaggctgtccaagcgcgtcaagtttgtgcgtgacatcatccgcgaggtggccggccaggcgccctacgagaagcgcgtgattgagctgctcaaggtcggcaaggacaagcgcgccctcaaggtctgcaagaggaagctcggaacccacatccgcgccaagaggaagagggaggagatgagcgccctgctgcgcaaggtccacaagaagtgaatgc

SEQ ID NO: 534 - DNA, 317 bp, Chlorella vulgaris
cggggccagccacgcgtccggacacctctggcctgtccgccgatcccgagaccttctcccgctacagggaggttgaggtgatccatgcccggtgggccatgcttggcgcccttggctgcgtcgtgcccgagctgctggaccgcaacggcaccgtcaactttggcgagaacgccgtgtggttcaaggccggtgccgccatcttcggcgatgacgggctgaactacctgggcaacccctccctcatccacgcacagtccatcgtggccgtgctgctctcccagattgtgctcatgggcctggttgagggctaccgcgtg

SEQ ID NO: 535 - DNA, 465 bp, Chlorella vulgaris
ggggccagccacgcgtccggaaacgatggcctccaccatgacctgcaccgccctgcgcgcctcggtcgccaggagggctgccccggcccgccgcggctccgtcagtgtgcaggccgccgcccgccccgtgtggctgcccggctcggagttccccaagcacctggagaacgtcaagctgcccggcaactttggctttgaccccctgggcctgggcgcggaccccaagcagctggagtggaatgcggagtctgagcgcgtgcactgccgctgggccatgccgggccgttgccggcatcctggcacaggagattgtgcaccccgagcagttctggtacacctcgggcgccgagatcaagctgcccttcaacatcctgggcctggtggcgtttgagctctttgccatgcactgggtggaggtgaagcgtggtctggacctgaaggaccccggcagccaggactttgacc

SEQ ID NO: 536 - DNA, 282 bp, Chlorella vulgaris
aggcgtccgcggacgcgtgagtcaaagtataagttatcatccttcttatacaaccagcactggtattgttctctgcactgttcacgcctccctgttgaggcgctgtgcaccttgcccaaactgccgagtgggcagctttgtacccttgggagttaggacacgctgccgcctgcactgccgcttatctggcgcttccggcggggggcatacatgctcggtgctcgcaatggctgccgccctggctttcgagaccgccgctccgcatgcacgctccgttggtgt

SEQ ID NO: 537 - DNA, 365 bp, Chlorella vulgaris
cccacgcgaccgcacacgcgtctgcggagatctcgacacatgctcgggctacagggaggttcacgtgatgcatgccgggtgggcaatgcttggcgcccttggctgcgtcgtgcttgaactgctggatcgcaacggcagcgtcaactttggggagaacgccgtgtggttcacgggcggtgccgctatcttcggtgatgacgggctaaagtacctgagcaaaccctccctcatctatgcagattccatcgtgtccgtgctgctctcccatattgtgctcatggccctggttgagggctactgcttgaacggtggtgcctttggccacggccttgatgccctgtaccccggcgaggcttttaacccct

SEQ ID NO: 538 - DNA, 390 bp, Chlorella vulgaris
  unsure (1)..(390): unsure at all n locations
cggacgcgtgggggatccggcaaggaagcaagatgccgatccagggcgggcacaagtaccaccagtatcaggtggtgggacgccaccttcccacggagagggagccggagcctaccgtgtaccgcatgaagctctgggccagcgaccctgtcagggccaagagcaagttctggtacttcctgaggaagctgcgccgggtcaagaaggccaatggccagatcctggcatgcaacgagatctttgagaagcaccctaccacggtgaagaactacggcatctgggtgcggtaccagtcgcggactgggtaccacaatgcgtacaaggagtaccgcgacaccaccctcaacggcgccgtgtcgcagctgtatcaggagatggcctcncgccacc

SEQ ID NO: 539 - DNA, 412 bp, Chlorella vulgaris
cgactatgaccagggagcaaccaagagcaagattgacaagctgattgccgacaacccggtcatggtgttctcctggagcggctgtccttactgcaagaaggccaaggcgctgctggacgaggttggggccaagtacactgccttggagctggaccagattgacgacggcaaagccattcgggcggagcttgcccgccagactggacgcaccagcgtgcccaacatctggatttctggtcagaatgttggcggatgcaacgacgggccgggagttgccacactgaataacaagggggagctcaagcctatgctcaaggctgccggcgccttgttacagtagatgctggtagagggtgagctggcgatcaaacctgaccggtctggttgtggcaagcgaagcggacggacacac

SEQ ID NO: 540 - DNA, 382 bp, Chlorella vulgaris
cacacgcgtccgcccacgcgtccgcaagccgggaatcgagttggccttgagccgacgcgtttgacgcccgcagcagcacctaacacacgcaccaggcaccatgctcatctccaagaagaacaggcgtgaggtgtacaagttcctcttcaaggagggtgtgctgtacgcggagaaggacttcaacctgccggagcaccccgagattgagggggtgtccaacctggaggtcatcaagctgatgcagtccatgaagagcaaggacttggtcagcgagcgctatgcctggcgccactactactggttcctgacggacgcgggcatcgagcacctgcgtgagtacctgaacttgcccagcgagattgtgcccggcaaactgaagaaa

SEQ ID NO: 541 - DNA, 303 bp, Chlorella vulgaris
catgggttttctacagtagccgaggcctaggggcgaagggtgcttcttcactcagacacggctcctgccgatcgtctgaggaaccgtgcatcatgacttcgaagttccctgcacacgcaatcacaagggagcccgcgcggacgactatagtgaacagccttaaggagatgtggccctttgttgcgggcttctctctaactggctatatcttcacaaaggttgccctgtcagtgacagatgaggatgtgaagaactcaaagtttgccaaccccaagggccacagccactgagccctgaactggc

SEQ ID NO: 542 - DNA, 425 bp, Chlorella vulgaris
  unsure (1)..(425): unsure at all n locations
gaaacatggcacccaagaagaaggttgcggcccctcctgccgcggtcaggaaggccgctcagccggccaagcccgtgaaccccctgtatgagaagaggccgaagaccttcggtatcggtggtgccctgccacccaagaccgaccttcaccgctttgtgaagtggcccaagtatgtgcgcatccagaggcagaagcgtgtgctcaaccagcgtctcaaggtgccccccgcactgaaccgcttcacccgcacgctggacaagaacatggccgagagcctgttcaagctgctgctcaagtaccgccccgaggacaaggcagccaagaagcagcggctgctggctgaggccgaggcccgtaccgccggcaaggaggtggagaagaagaagcccgtggtggtcaagtttgggctgannacacatcacacg

SEQ ID NO: 543 - DNA, 161 bp, Chlorella vulgaris
tggccatctgcgtgcacggcacaacaaaggttccccaaaaaactaactcaacaacgaacccttcaagggcaaaatccaagggaaccctgaaaaccaattttggttggggcaaaaattaaaaggggctttaaaaaagggccaaaaattgccggtccaaggcc

SEQ ID NO: 544 - DNA, 357 bp, Chlorella vulgaris
  unsure (1)..(357): unsure at all n locations
ggtggaatcaccccgtccgaacaacanggtccacaggttcacaaagactgcagaccctcccctgccccgttttcggcgtcccgcgccccctgtccccccgggggcaacccgccagggtgaaccggcgcctccgtggagtggtacggccccgaccgcgccaagttccgggcccttaccaacccccttcctacctgaagggtgagttcgctggcgactacggctgggacacctctggcctgtccgccgatcccgagaccttctcccgctacagggaggttgaggtgatccatgcccggtgggccatgcttggcgcccttggctgcgtcgtgcccgagctgctggaccgcaacggcaccg

SEQ ID NO: 545 - DNA, 348 bp, Chlorella vulgaris
tccgggtccttttattttttttatattttttgttttttttttttttttttttttttttttttttttttttttctatttcacatctcaaatggccgccggacgggctataagcttaagtccgagtgcaggggacgtcataactcatcaatcttctaaagtaacttcaattcacaggccaccggcctacaaggtcaaaactgggaaaagcaaagatttggcaaatttaaaccctatgcagcatagcagactttccccagctggagtcaggccgaagaggcacgcaggccattaccgttcccaatacttaagaagtgcgaatgctgaatgggaaacggcatgtacccggga

SEQ ID NO: 546 - DNA, 416 bp, Chlorella vulgaris
  unsure (1)..(416): unsure at all n locations
gggcagggcagggtaagagcacttccgcttaaacacacaaggtccgctgaaggcggacgcaacatcgtaggcagacccatacttctcgtacggttctgttggctgtgtagtctgttgtgtcagacctgcagtgtcgaccttcggctttgttattgctcacagtccttgttgttgcccaggttctggccggtctcttgagcataaaggatgcattccctggccgggtataccctggtcgggtatctctaaggttttgtanggcgtctgctcctggacctgggctgcacttatgtctctgcaactctttctttgtgacgtaattaccgctctagccagggatatggtcagggctgctgggattgcgcaaacccaaatattgtaaagtattgtactcgcctccactgcatacctggaag

SEQ ID NO: 547 - DNA, 360 bp, Chlorella vulgaris
ggtgatccccgtctcgcaatagttccagggcaatcactatgcaggcaaccatgatgaagaccttcggcgccagcctgcgcaaggctgtgcccacccagggcaagggcacccgccaggtgacccgcgcctccgtggagtggtacggccctgacagggccaagttcctgggccccttctctgagggctccacccccagctacctgaagggcgagttcgccggcgactacggctgggacactgctggtctgtctgccgatccccaaaccttcgctgcctaccgcgaggttgaggtcatccatgcccgctgggccatgcttggcgccctgggctgcctgacccccgagctgctgcagaacgccg

SEQ ID NO: 548 - DNA, 396 bp, Chlorella vulgaris
cgggtccagccacgcgtccggaacgtgaagaccaccgacaccagccagtggtacggtcccgaccgccccaagttcctgggccccttctccgagggtgctgtgccttcctacctgaacggcgagttcgctggtgactacggctgggacaccgccggcctgtccgccgaccccgagaccttcaagcgctaccgccagattgaggtcatccatgcccgctgggccatgcttggcgccctgggctgcatcttgcccgaggtcctgcagaggtacagcggcatcgagttcggcgaggctgtgtggttcaaggctggcgctcagatcttctctgacgacggcctgaactacctgggcaaccctgccctcatccacgcccagtccatcattgccaccctcatc

SEQ ID NO: 549 - DNA, 390 bp, Chlorella vulgaris
  unsure (1)..(390): unsure at all n locations
gggacgcgtcagcacgactggacgtgcggcagcagcgacgatggtgctgtcgtgcgacatcgatctcctgcatcctccccaggagctggagaagcggaagcacaagctcaagcgccttgtagcttctcccaactcctatttcatggacgtcaagtgccaagggtgcttcaccatcacgaccgtgttcagccactcccagacggtggtggtgtgccccagctgcaacaccgtgctgtgcgtgcccaccggcggcaaggcccgcctcacagagggctgctccttccgcangaagggcgattagtcaggggaggcgctacgctggcatgtggtctcaagaaagtgcgccgccgcggcttgaggactcttgccagcgggacagcgcggcctatc

SEQ ID NO: 550 - DNA, 428 bp, Chlorella vulgaris
acttactaaagatcgcagccatgggtggggagcgcgtcaggttgtacgtgagtggcaatatcctcggatacaagaggggcaagtccaaccagaccaaccacacctccctgatcaagatcagcggcgtcaactcaaaggctgagaccgaattctaccttggcaagaagattgccttcatctacaaggccaagaccgagaagaagggcagcctttatcgcgtgatctggggcaaggtcacccgtgcccacggcagcaccggcactgtccgcgccaagttcaggaagaacctgccacccagctccctgggcgccaaggttcgcgtcatgctctaccccagccgtatctagtggactgaagcggcgccgccagctggcgggcagcatgcacggcagcagtggcgatgcgcggcagctgtgccggagcaaact

SEQ ID NO: 551 - DNA, 206 bp, Chlorella vulgaris
caaaattttgagggaccatcaccatgccggcggaacagggctacagggcccgcacaaggtatatgttcaaacgccccttccggggcaagggatacattcctctctcaacttacctgaccaactacaaggtcggcgattatgtggacgtcaaggttaacggcgcagtgcacaagggcatgccccacaagtactaccatggcaagact

SEQ ID NO: 552 - DNA, 351 bp, Chlorella vulgaris
ggcgttcttggcaccatggctgagaagtcatgcacgatcaggacacgaaagttcatgaccaaccgcctgctgcagcggaggcagtttatccttgatgtgctgcaccctggccgtgccaatgtctccaagactgagctgcgcgagaagctgtccaagatgtacgacgtcaaggactccaactgcgtgtttgtctttggcctgaagacccagtttggtggcggcaagtccacagggtttggcctcatctacgacaacgtccagggggccaagcagttcgagcccaagtacaggctcatcaggaacggtctggcgcagccggtgcagaaatcgcgcaagcaagcagaggagcgc

SEQ ID NO: 553 - DNA, 320 bp, Chlorella vulgaris
cacacgcgtccgggatgacctcaagaagctgaacaagaacaagaagctggtcaagaagctggccaagcagtatgccgccttcctgtcctctgacagcgtgatcaagcagatcccgcgtctgctgggccccggcctgaacaaggcgggcaagttccccaccctcatcacccaccaggacgctgtggagaacaaggccaccgagatccgcagcagcgtgaagtaccagctgaagaacgtgctgtgcctgggcgtggccgtcggcaacgtcagcatggctgagcgcgagctctacatcatcatccagatgagcagcaatttcc

SEQ ID NO: 554 - DNA, 400 bp, Chlorella vulgaris
  unsure (1)..(400): unsure at all n locations
cccacgcgtccgagcgcagcccgttcctccgtggtggtgagggctgagcgccctctgtgggcccctggtgtggcgccccctgagtacctggacggcactctggcaggtgaccgcggctttgaccccctgggcctgtgtgcggaggcaaagatgcgcacctggtaccagcaggcagagctgcagaacggtcgctgggccatgctgggcgttgctggcatcctcggccaggagatcctcaaccccaaccagttctggtataccgctggcatgcccgagaacgtgcccgatctgtactacggccccaacggcgtgaacctgggaggcctcctggcctgagagttcctgctgttccactatgtggaggtccgtangtggcaagacatccgcaaccatcactccg

SEQ ID NO: 555 - DNA, 325 bp, Chlorella vulgaris
cccacgcgtccgcccacgcgtccgggaccttgcttaggggctaattactgggtcctagggctcacggcgctgtacaagtcgacagtggctgcttaccaggaggagactacgcaaggatatggtctaattaaatgctaaacgtgcagcaggaaatgtaaaggtaacctacaaaaaaaaaaaaaaaaaaaaaaaaaaaaaaaagaaatgaaaaacagaataaaaaaaaaaaaaaaataataaaaaacaaacaaaatccaaaaaacaaatactgcggactgcacagctaaagaataaaaggggggggcccccaaagggttcaaacctt

SEQ ID NO: 556 - DNA, 178 bp, Chlorella vulgaris
  unsure (1)..(178): unsure at all n locations
cccacgcgtccgcacaaatgctccctcaacgctgcggcatcacatggacccttgcaggacccccccctanggctcacagtgctgtacaagtctacagtggctgcctaccatcaggacactacgcggggatatggtccaattagatgctaaacgtgcagcaggaaatgtagaggtaacc

SEQ ID NO: 557 - DNA, 440 bp, Chlorella vulgaris
cacgacacaaacacccacccgcacaaagtggtccggtggtccttccagaacaacgagggcggctgggtgcaccacacggtggagggcaagatggtcaataagttccatgacatgggatgggatgccttcatgctgcaccctagaaaggaggtgcacagcaaggagttcccatatcgtcatggcgtggtggtcatgcagaggttctcgcggctcaacgtcaagcgaaaaagagggcctcccggcccaccccccccttgaggtctgcacatttggggatgtgtgcctgtgacacacgaaactgttgatggcaccttttttcctgaactgttgtatgttggttggtttgggaccagaacagagcaagttcggtctctggagttaacctcaacgctatgctttatagcctcctggctgtgccgctggtccattgctgccgtcat

SEQ ID NO: 558 - DNA, 398 bp, Chlorella vulgaris
attaaaatgagcgaaggtagcaagagaatgagggttggcgacgggaccctggcaccagggctacatgcggtagagcgcctgatcaacacgctctctaggctagccaaggagggcagagagtctggcatcgacagtgatcagatagatggcctgctgactggtctactcaggttgcaaacggaactgaagagcaccagtgtggagggggccttggatgaggctctgaaggacgtgctaaggcagctagaggcggcaacagaggcactccaggcagtcgtggacaaatacactccgcccgacggttaacagcctcctgtgccaagcgatgaggagtgggcacggcgcgtcatcacatatgcccataagctcagctacgacactttcgccccggtcggatt

SEQ ID NO: 559 - DNA, 361 bp, Chlorella vulgaris
acccacacgtccgatggaatcccccgtcgacaacaggtccaaggttcacaagatgcagaccctctctgcccgtttcggcgtccgcgcccctgtctcccggggcacccgccaggtgacccgcgcctccgtggagtggtacggccccgaccgcgccaagttcctgggccccttcaccaaccccccttcctacctgaagggtgagttcgctggcgactacggctgggacacctctggcctgtccgccgatcccgagaccttctcccgctacagggaggttgaggtgatccatgcccggtgggccatgcttggcgcccttggctgcgtcgtgcccgagctgctggaccgcaacggcaccgtcaac

SEQ ID NO: 560 - DNA, 413 bp, Chlorella vulgaris
accacgcgtccgcttggagccctttgctgtgttgccaccatgcctgcaatgctggccaaccgtgctgccttcactgccgcaaggccggccactggccgcgctgcccgcagcactctgagggtccaggcggccacgtggcagaaggccaccaccaaggaggccctgaagagcgctggtggcaagcaggttgtagagctggacaaggagagggtgctggtggtcgaggaaggtggcaatgtctatgcgctagcaaacaagtgtgtgcacatgggtctgccgcttcagggcaagacgggcctttttcaggcaaaagtggagaatggctgtgtgatttgtccagcccacgccaccgctttcaacctggagactggagcagtggagggccagtggtggcccaagttccctgagctccc

SEQ ID NO: 561 - DNA, 384 bp, Chlorella vulgaris
gacaccaacaacaacaacaagtacctgctgggctacaccgccgactctgcgaaagccacggcggacgctttctgccgcttcaaggggtacggcggcgctggcgcctacgagcccctcaccgtgccggcccagtttgttgccggcgcgggtgcctgggccacgtacaacctggtgaccaaggaggcctgcagcggcccccagtgcaccgccatcggcgtggtggagtgcgtcaagcagggggcgacacccctggccaaggatgccgccggcaacgtgggctgcgccaactctggaatcaataacattggctctcacaactcagggagcaatgtgcgcggcaatgacaactcgggcagcaacgtttggggtgactccaactctggt

SEQ ID NO: 562 - DNA, 407 bp, Chlorella vulgaris
cgcgtccgcacacacgtccgcccacgcgtccgctcctgtgcaccggtgaaattcctgcgggcttgctgtgccctcagcctcacacgctgtgctaaaatgggagctggactgcattgtggatgccgttcttgcactactcatagcactgcacgcattgggatttcaatcctgggaaatgggcctggtctcatgcaactgaaacaacggcaagcaagctgccttacttggacatatgtagccggagacataatatgtgtgtaagcaacgctcacttgtgggttggttgcaccccgcattcacggaagggcactgtatatattgccttgttgcttatttatgtgttttgcagactgactatgttgctaatggtggagatgctttattgccagcctggaatatgttgtttt

SEQ ID NO: 563 - DNA, 221 bp, Chlorella vulgaris
ccaacgcgtccgaatgttggcagcagcattggtgccccttgtttggaacccgcctgggtcgcttcaaagtcacaaaaagataaactctactaattgcatttttgtgcacatgaaaaacagctgacgtcctgtacatctagggatggtaaattggtttagtcactgacactgctatggcagtgtcactacactagacacggggcttgtaatgtcaagcaggc

SEQ ID NO: 564 - DNA, 265 bp, Chlorella vulgaris
actgtctgtgtcataattggatgcttacagcattgtgactgccgtagttgcactactcatagcattgcatacatggggatctcattcatgtgagatgggcctggtctcatgcacctgacacacgggtagccaagctgccttacttggctatatgtgccggcgaacataagatgtgtgtaagcaacgctcacttctggtttggttgcatcccgtattcacggaagggcagtgtctatattgccttgttgcctatttatgtgttttg

SEQ ID NO: 565 - DNA, 282 bp, Chlorella vulgaris
acgagtccgaaggggtgaaacatggaacccaagaagaaggttgcggcccctcctgccgcggtcaggaaggccgctcagccggccaagcccgtgaaccccctgtatgagaagaggccgaagaccttcggtatcggtggtgccctgccacccaagaccgaccttcaccgctttgtgaagtggcccaagtatgtgcgcatccagaggcagaagcgtgtgctcaaccagcgtctcaaggtgccccccgcactgaaccgcttcacccgcacgctggacaagaacatg

SEQ ID NO: 566 - DNA, 280 bp, Chlorella vulgaris
acgcgtccgaacacacgtccgcggacgcgtgggcggacgcgtgggggcgtggagtggtacggacccaagatgcccctgttcctgtgcccctacagccccgagtccccgaaccacctgaagggtaagttcactggcaactacggctgggacatctccggcctgtccaccgatcccgacaccttctcacgctacacgtagattgccgtgattcatgcgcgctgggccatgcttggcacgcgtggctgcatcgtgcccgagctgcttgaccagaccatccacg

SEQ ID NO: 567 - DNA, 389 bp, Chlorella vulgaris
aggacgcgtgggcaggtggcaaggatgcggttttgtggaggcgggatgcaatccatcattggttgcttgccttagtacctctgcccaggtggtggccaactccctggtggcaagcaaaggttgcgtgggtaagtggtggagcaggtgtggaactgtacctattatctattagaaccctgccagcaagaagtcccttaggggcaggcggctttaggcacgcgttggtctacgggccgactttggtactcctgctgctgggacacaggttctatggcattacctggaagactcgattacttcttggtgctgtctgtggcgttgcctggcccctaacaatcccaaagtggcggcctctgatgcaagggagcgtgatgcagatgacataaact

SEQ ID NO: 568 - DNA, 157 bp, Chlorella vulgaris
cacgagtccgaaaaaacataggcaagatggaaaggatgcggttttgtggaaagcgggatgcaatccatcattggttgcttgcctggaatgctctgtccaggttgtggctaactccctggtggatggcaaatgttgcctcggtaagtggtggaccaag

SEQ ID NO: 569 - DNA, 381 bp, Chlorella vulgaris
  unsure (1)..(381): unsure at all n locations
ccacgcgtccgcacacgcgtccgggaggagcctaagacggttgttttgactccctgatgcctgcattgggtaaaggtgccaggcaaggcgaacagagcggaggtangggcatactggagtaaatgggtatgcagttatggtctgtgcattgcactggggccagtgagggtgctgaggcctgctgctgctgccgctgccaaagcatgggggctggctagctgcaatggagcccacggcttccactctgtacgtgtgttagcaagggtggcaggtagtgcgaacaggactgatttcaaacccgttcgctatatgcttcgtanccagtgcttccataatgggtaatggaaacggggcctgatangctgaaagtctgcgcactgc

SEQ ID NO: 570 - DNA, 338 bp, Chlorella vulgaris
  unsure (1)..(338): unsure at all n locations
ggggccaaccaaggcttcggaaacaacaggtccaaggttcacaaaatgcaaacccctcggccctttccgggttcggcgccccggtctcccggggaacccccaagttgacccgcgcctccttggattggaacggccccaacggcgcaaatttccggggccccttcaccaaccccccttcctacctgaagggtgagttccctggcgactacggctgggacacctctggcctgtccgccgatcccgagaccttctcccgctacanggaagttgaggtgatccatgcccggtgggccatgcttggcgcccttggctgcgtcgtgcccgagctgctggaccgc

SEQ ID NO: 571 - DNA, 278 bp, Chlorella vulgaris
ccgtccgggacgagcctaacacggttgttttgactccctgatgcctgcattgggtaaacgtgcccaccagggcgaacacaccggaggtacgggcatactggactaaatgggtatgcagttatggtctgtgcattgcactggggccagtgagggtgctgaggcctgctgctgctgccgctgccaaagcatgggggctggctacctgcaatggagcccacggcttccactctgtacctgtgtcagcaccggtggcaggtactgcgaacaggactgatttc

SEQ ID NO: 572 - DNA, 335 bp, Chlorella vulgaris
gcacagcatgccagcggagtcccaagtcccattacatgcatgtggttggccacgacgtgcacgagcgccccgtcatctacagctgcctggagctggccaccaaccgcaacatcgaggacaaccgcacgcacatgatagccactttccagcaggccatcaaactcatgcccgagggtgtggagtcgtggtgctgggtgctggacttccatggatttggcctggcagactgcgacccgcgcctggcacgaatcttcctcaacctgtcagctgcacactaccccgaacggctcggccacttcttcattgtatcggcgcccacactgttcaacacgctg

SEQ ID NO: 573 - DNA, 379 bp, Chlorella vulgaris
ggggtgggtggagagagcacgatacaatgaagttctctacccgcgtcagctcctccaggcggaagtgccgcaaggcacacttctcggcgccctccagcgtccgcaggtcgcttatgagcgctcccctctccggcgagctgcgcaacaagcacggggtgcgctctgtgcccatccgcaaagacgacgaggtgaccgtcgtccgcggtacctacaagggccgtgagggcaaggttgtgcaggtgtaccgcaagaagtgggtcatccatattgagcggatcacacgcgagaaggttaacggcgcaaccgtgaatgtgggtgtcgacccctccaaggttgtgatcaccaagctgaagatggacaatgacaggaagaacctcct

SEQ ID NO: 574 - DNA, 309 bp, Chlorella vulgaris
accacgcgtccgcccacgcgtccgcccacgcgtccgcccacgcgtccggtggaatcccccgtcgacaacaggtccaaggttcacaagatgcagaccctctctgcccgtttcggcgtccgcgcccctgtctcccggggcacccgccaggtgacccgcgcctccgtggagtggtacggccccgaccgcgccaagttcctgggccccttcaccaaccccccttcctacctgaagggtgagttcgctggcgactacggctgggacacctctggcctgtccgccgattccgagaccttctcccgctacagggaa

SEQ ID NO: 575 - DNA, 348 bp, Chlorella vulgaris
accacgcgtccgcccacgcgtccgctgatgttttataaaaaaattttataaattttttcgtaccagaaattctatttttggaacaaacatagttttttatttccttttcttttccttttcagttttttaaaaaactgaaaaggaaaagaaaaggaaaagaaaataagttaaatttgaaatttatcagaaaaatatcgtttttcttttattaatacgatattaaaaatatagttttcttattaacaattttttcaatattaatagaataacaaaacgagaattaagaaaggtttgccacaaagtggaagaattttacaaatggatggaacggaaaaaaaagataaaagg

SEQ ID NO: 576 - DNA, 363 bp, Chlorella vulgaris
  unsure (1)..(363): unsure at all n locations
cgcgtccgcccacgcgtccggtctctctggcgttgcctgggggttaaaccgcacaaagattctcccctaacaatccttaacaatcacaaacaagcaacggacaactaacgaataacagctccccaactggtccccgggactggtcaggacataagagcctgcatgcacatcatcaaggcagttgtgagcgagtcttggctgccacctcgatangagatccgttgtgttaatatgtggcttgctgggacctgctcgctgcttggttggctgcaagcaagtttttgagaagaatgctttgcangactgttcgcttgggccacgaaacggggtccttaatagggatcactgtaacatangacgcct

SEQ ID NO: 577 - DNA, 323 bp, Chlorella vulgaris
cggggcccaccaacgcttccgacttcatggaccggaacaatgaaattcaggatgttttggaaaaaacctaccccctgcctgacaatttcaataattcaaacttaatggataacctgaaccctttggaggacaacttggcctccaaggcgttggcaagcggggcaaccccggccaacttgaaggagcaaaatttccaaaaggttgcatccggcaggcatcgcagccgcaaggaaaagacgagtttgggctgccagccgttccacagcggacatgacatggctgctgggtggtgggcgcgtgaagcaagtgatgggcggctggtg

SEQ ID NO: 578 - DNA, 341 bp, Chlorella vulgaris
cccacgcgtccgcttgtctgtgggttcgtgtggcagctcgactgcaccatggcgacccccatctccaagaagaggaagttcgtgcaagacggcgtgttttacgctgagctcaacgagctgctcaccagggagctggcagccgatggttactctggtgtggaggtccgtgtgacacccatgcgcacggaaatcatcatccgtgccacccgcacacagaacgtgctgggggtcaagggacgccgcatccgcgagctgaccagcgtggtgcagaagcgcttcaagttccctgagggctcagtggagctgtatgctgagaaggtggccaaccgcggcctctgtgc

SEQ ID NO: 579 - DNA, 360 bp, Chlorella vulgaris
cagcgtccgaaaaccgtccgcccacgcgtccggtctctctggcgttgcctgggcgtacatctgcacacagatcctcccctactattcgtgaacatgcacacacaggcactggacagctagcgatgaccagctcgctagctggtctccggactgggtcaggacataggaacctgcatgcacatcatcaaggcagttgtgagcgagtcttggctgccacctcgataggagatccgttgtgttaacatgtggcttgctgggacctgctcgctgcttggttggctgcaagcaggtttttgagaagaatgctttgcacgactgttcgcttgggccacgaaacggcgtccttaatagggatcactg

SEQ ID NO: 580 - DNA, 325 bp, Chlorella vulgaris
ggcaagatggcgcggggcccaaagaaacatctgaagagattgaatgccccgaagcactggatgctcgacaagcttgggggcatctttgcccccaagccgagcgcgggcccccacaagacccgggagtgcttgccgctcatcctgctgctgaggaacaggctcaagtacgctctgacgggcaaggaggtgacgagcatcctcatgcagcgcctggtagaggttgaccgcaaggtgcgcactgacaagacctaccccgtgggcttcatggacgtggtcaccatccccaagaccgacgagcacttccgcctggtccacgactgcaagg

SEQ ID NO: 581 - DNA, 238 bp, Chlorella vulgaris
gtgagcggcgtctgactgtggggcggagtgctgcggggcggggtgctgccttgatggcaggatgcctccagcagcccccaaaacatgtctgacagaggactgcgctatacattgtcgacttaccaattcgagcttgattaggtcctgcctgtgtgcagtttgggtgttctgtaactcgttttgctgttctgtgcaacaccctctgcttgtggcgctggttggtgctgtttgccttgga

SEQ ID NO: 582 - DNA, 392 bp, Chlorella vulgaris
cggacgcgtgggcggacgcgtgggagcagcgcggcccaccctataaaagtatcgactcgggtgcagtgctaaccactgctgctgcctccaacccgtctcgccactgatcgtcatgcagccacgacaggtgcaagtccagcggggtgccaaccctttgcgtgcaactgctttcaggcctcttgcaggccctaggcgttgttcagtgcgggcgggggcatacctagaaaccaagtctggcacgaatgcaccccccaccccgactgctgccaaccagttggaggccctgaagcagatgagcaaggtggtggcagacactggtgagattgaggccatcaagctgtacaagccggtggactgcaccaccaaccccagcctggtgctcaaggcgatgc

SEQ ID NO: 583 - DNA, 397 bp, Chlorella vulgaris
aggacgcgtgggcggacgcgtgggcggacgcgtgggcggacgcgtgggcggacgcgtgggcggacgcgtgggcggacgcgtgggtgcaccccttgcttctggggcaaaggagacctcgaggaagcaaatcgactgcaagtacatgtggcgggagggctgcagtgctgtcatcgggcccagtggggtggtgggcgcagctggcctgaccaccgaagctgctgctgaccggaggcagctcctgcaggcctcccgtgcgccgcccgccaactgcagcgcccctggagacaaatggactcccagcagcatcgcctgccagatgaccgccgactactccctcagctgcacctttgacaagaccaacggcaacgccctccggcaactgcaaggctcccaaccg

SEQ ID NO: 584 - DNA, 388 bp, Chlorella vulgaris
cccacgcgtccgcccacgcgtccgcccacgcgtccgcgagacgctcgccccttctcggaagcaggtcaccaccatgcagaccgccaccatgcagaagtccttcgtgggcaccagcgtgaaggcccaggccccccgtgcccgccagaacatgagcaccgtggtggtggcttcctccggcaagaagattgacctgaacaagcagggcatcaactctgtcgagaaccccattgtcaagctgaacctgcgcggcgagagcaagagcatgcagagcaaggactgggtggacccccagggccgcaagggcaagggctttggcgtctaccggtttgccaacaagtatggtgccaacgtggatggctactccccatctacacccctgacacctggt

SEQ ID NO: 585 - DNA, 330 bp, Chlorella vulgaris
accacgcgtccggtttttgacaccttcggcgcagcatgccatggctgcggatgcatgagcggtagataccagaacgagaccaagcgtgtgcacggctttgtggtcttcgagtagaatgggtgagtcggtaccttgacttgcacagcattgttaacgggcccttgccttgacactgtgggctgctgtgcggtccacctgcaggcgcctgtttgtttgttgccagtgttttccggagccgctcatgtatgggatgtgtggggacgaccgtgccttgtattgcccaagtgttgccgggtcttgaccgttacgttgttaaaatgcctaacaggc

SEQ ID NO: 586 - DNA, 367 bp, Chlorella vulgaris
cggacccttgggaaaaccggtaacaatgggaaaaaaaactgtggcccaatggctaaacaactttggaatgcaatttggccttaattttaacaagccaaattggccggcgaaaattatccggtatggtggaaaaccggttaaatatggtcaattaagcaagtcgaatacaatgtggacgtatggctaggctcaccaagaaggtggccgcccactgtgtgagtgcaagacgactattccgcagctattgacttgacgacaggttgacacttttacagaggtggggaacactcttctgctgttgatgattgctgccttctccgacaggccaaagctacccaggttgacagcacgagatcagatttccttg

SEQ ID NO: 587 - DNA, 406 bp, Chlorella vulgaris
  unsure (1)..(406): unsure at all n locations
accacgcgtccgtagggatcatatcggcacgaaccgtcaacatgccgaagacggtcgtggttgattgccggggccatatgcttggccggctggcgagcatcctcgccaagcagctgctcagcgggcagaatgttgtctgcgtgcgctgcgaggagatcaacatctctggcggcatggtcaggcagaaaatgaagtatgagcgcttcctgaacaagcgcatggttaccaaccccaggagggctgcctacaagttcagggcacccgcccgcatcctgtggaggactgtccgcggcatgatccctcacaagaccccccgcggcgcagcagccctggaccgcctcaaggcccttganggtgtgccccacccctacgacaaggtgaagcgtctggtgatcccgatgcgctg

SEQ ID NO: 588 - DNA, 393 bp, Chlorella vulgaris
accaagatggcgaaggacaagtctcgctccgccgaggtggtgacccgcgagtataccattaacctgcacaagaggctgcatggcataaccttcaagaagagggctcctaaggccatcaaggagattaagaagtttgcccagcaacaaatgaagaccagcgacgtgcgcgtggacgtcaagctgaacaaggccgtgtggagccagggcatcaagaacgtgcccaaccgcctgcgcattgtgatccagcgcaagcgcaacgaggacgacgacgagaaggaggagatgttctccctggtcaccctggccgaggaccagagcagcaagggcaagggcgtggtggtcctggaggcataaacacacacacgcgcctcgccggggggagctgccgcagca

SEQ ID NO: 589 - DNA, 299 bp, Chlorella vulgaris
  unsure (1)..(299): unsure at all n locations
ggcatcagcgtcagcatgaatggagcggcggttgggcaggggctgcacatccagcatgtcgtagccgggaactccattgcaaatgtgctggccaatgcacagcatggcagcacagagatgctggagagtgtgagggcggcagcggagcatgcagtgggggctgggcgactcacggcagaagcggcagagcgcctgctcgacaacttcaacaccaggctgcacggctacacgtacatggcttgatggttttggagccccttggactaggcaggcantagccgctctgacggcttcagcag

SEQ ID NO: 590 - DNA, 344 bp, Chlorella vulgaris
agacttgccgcttcagcggcctcaggatttatcctggcaagggaatcctgttcatccgtgttgatggccagcaattcctcttcctgaagcagaagtgcaagagcatgttcaaccagaggaagaggcccgcaaagattgcttggaccaccctctacaggaagcagcaccgcaaggaccaggaggcgcaggttgcgcgcaagaagcgcaggtctgccaccaaggtgcagacgcgctcaattgtgggcgtgtccctggaggtgattcagaagaagaaggcagagaagcccgagcagcgcaaggcctcacgcgaggcggccctccgtgagatcaaggagcgtgccaag

SEQ ID NO: 591 - DNA, 357 bp, Chlorella vulgaris
gaactccttgtggctgtctcgggcaaacaaccgcaaagatgcagactgctttcgccggcaaggtcgctctgttcaagggcactgtggctgcccccaaggcgcagcgcaggtccctggttgtccgcgcgggccagtatgatgaggagctggtgcaaaatgcgaaaaagatcgcctcccccggcaagggcatcctggccatggacgagtccaatgccacctgctgcaagcgcctggagtctatcggcctggagaacaccgtggagaaccgccaggcgtaccgccagctcctggtgaccacccccgggctgggccagtacatctccggcgccatcctctttgaggagacgctcttccaaa

SEQ ID NO: 592 - DNA, 320 bp, Chlorella vulgaris
  unsure (1)..(320): unsure at all n locations
gcaaaatggcgagcaaggtgtccggcgaggtgctgcgtgagggtatcgctggggtgctggagggctccaagtccaaggcccgcaagttcacggagaccgtggagctccagattggcctgaagaattatgacccccagaaggacaagcgtttcagcggctctgtgaagctgccttactgcccccgtcnccacctgaaggtgtgcgtgctgggtgaccacaagcactgcgaggaggcccagaacgcgggcattgacgcgatgagcgtggatgacctcaagaagctgaacaagaacaagaagctggtcaagaagctggccaag

SEQ ID NO: 593 - DNA, 253 bp, Chlorella vulgaris
acggcccttacatcaagatgggtcgtgtcatccgcgcccagcgtaagggtcgtgggtcggtgttcaagtcccacaacacccacaggaagggcgcaaccaagctgcgcgtcctggacgccgcagagcgcaatggctacatcaagggcgtgattagcgacatcatccacgaccccggccgtggcgcacccctggccaaggtgactttccgccacacccacaagtacaagcacgacaaggagctgttcatcgcccc

SEQ ID NO: 594 - DNA, 216 bp, Chlorella vulgaris
cggtccgagattcccggggccaaccaagccttcggataaaaaccaacggggggcaagttacaaccaagaagccaaataatgcatacccgggcaacgggtggcaaaagaagctggagggggaccaagatgggaagctgcgtgccttctttggcaagcgcctttcccaagaaggttaaggccaaggctttggccaagaattcaggggctaccttttca

SEQ ID NO: 595 - DNA, 308 bp, Chlorella vulgaris
acgcaacttcctgggagagaagcgcgtgcgcattgtcaagatgctgccaggcgtgaaggtggagcgctctgcagctgtcaaggatgagctcatccttaccggcaatgatatcgagcttgtcagccggtccaaagcactcatccgccaggtgtgccttgtgcgcaacaaggacatccggaagttcctggacggcatctacctgtcggagcgcggcgtgctgtccaaggacgagtgaatctgatccaacagcggcagcagcagcagcagcacttgacagctagcagtggggtgcaagtgtgtgggcggca

SEQ ID NO: 596 - DNA, 401 bp, Chlorella vulgaris
atccaccgcaagcgggtcgaggaggagtacgctccgctctatgacaagtatggcaccggactgaccacttggagtcccctggcctcgggcgtgctgaccggcaagtacagcggcggcaaggtccccgagggctcccgctttggcctggaaggctacaagtctctggctgaccgggccctgaagggcgagaaggcccaccagctggacctggcagaccagctgaagcccattgcccaagacctgggctgctccctggcacagctctcactggcctgatgtgtgaagaaccctcacgtgagctccgtcatcaccgggtccaccaaagtgccacagctggaggagaatatgaaggctttggagtatgtcccgaagcttactgacgagctgatggccaagatcga

SEQ ID NO: 597 - DNA, 337 bp, Chlorella vulgaris
cacacgcgtccgctcgtgttgaggcctccaaggactcgagcagcgctgccgtgattgatgtcaccaagtatggcatcttcaaggtgctgggcaagggcgagctcccgcagcagccagtggtggtgaaggccaagtttgtgagcaagctggcggagcagaaaatcaaggcggtgggtggcgcggtacagctggtggcctaagagaccaggacagcaaagaagcagctccttgcacacagccagcccttccgctagggagtggagtgtgcaagggcgggttttggcacagcggcaggcgcggcggcggcagcagcggaacagagcggccagtggggtgc

SEQ ID NO: 598 - DNA, 405 bp, Chlorella vulgaris
gtacggtcgtacatcccggggccgaccacgcgtccggataagacgcaacggctggcaagtaccacccatgaagctaaatattgcatagccggccaccggatgccagaagaagctggaggtggacgatgatgggaagctgcgtgccttcgtggacaagcgcctttcccatcaggtttagggcgaggccttgggcgacgacttcaggggctacgtcttcaagatcaaaggcggccaggacaagcagggcttcgccatgagacacggtgtgctgacctcgggccgcgtgcgcgtgctgatgacccccggcgaccagtgcttccgcgggtacaggcggcgcacaggcgagcgccgtcgcaactccgtgcacggctgcatcgtgtcccccgacctctccgtgctcaacct

SEQ ID NO: 599 - DNA, 325 bp, Chlorella vulgaris
caccacgcgtccgggccatcacatttgtggcctcgccccaggactccgaggttctgaaccaagtgcaggagcggttcgatgtggacatcaagcccctgccggagcacattgacgcttccacatacatgaataccgcttgattgaggtctgatcttatttgcgtgcgcggggcctcggatgaacagcagagcgctgttgaggcttggcctttgcgggactgctgccctggacgggtggtgccacaaaagcaatgtggcttgagagggtggtttgcacgggactaagctgagtgctttgtgcgaattgtgtgtaagggttccgtttg

SEQ ID NO: 600 - DNA, 284 bp, Chlorella vulgaris
cccacgcgtccgcccacgcgtccgctgccggggagtatctgcaggttgcagcttatgctagaatgggttgggctgtgtgctgtggctttggctggcaggcacgtgatgcaattggtctggtagggggttgcttcaagctgtgtgggggatgaagtgaacggcggtggcattcgcctgggtacgctaccttgggccaacaatatttgtcatgctatgacgacacgttggcccgtaccctgacctgcaacaagcagtgcgtatgtggctgacttgacaaccataaa

SEQ ID NO: 601 - DNA, 404 bp, Chlorella vulgaris
cttgtgcggtctgtaaggcgcattgccagaagccagcgtccgccgggcaaaacaagccaccatgaggaacgacgctggcgagattgtggatctgtacatcccacgcaagtgctcgtggaccaacaagctcatcacggccaaggaccacgccagcgtgcaggtcaatattggccacctggatgagaatggcgtgtacactggcagcttcagcacctttgccctgtgcggccaggtccgctccaagggtgaggctgatgccgctatggacctgctctggcagaagaagaaggctgagattggccagcagtgattggagcttgagcgcgggcagcacgctgctgtgcacgctgtgatgccctcggagcaaaccgggcagtgcacggtcatggcagttaccatttggc

SEQ ID NO: 602 - DNA, 325 bp, Chlorella vulgaris
aggacgcgtgggcggacgcgtgggcgcgaggcgtggcctgacctggtagagcaccatgaccgggtgtggggccaggagaagattgcagcctacctgcagggcccccagcgcccaccccccatgccgctcaaatttgtggacgatgagtaatggtggcttggccagaggagctgaaggttggggacaatgaggagtactggcccagccagagaagctgatcatggaagcgtgggctgcctaactgcgccgcctgtggtgttacccgaccttgctaaagggtggtcaaacctgttgaggggtaatcaacaaaatgactgggggcccc

SEQ ID NO: 603 - DNA, 400 bp, Chlorella vulgaris
accacgcgtccgagttgtgcaaaatggcgagcaaggtgtccggcgaggtgctgcgtgagggtatcgctggggtgctggaaggctccaagtccaaggcccgcaagttcacggagaccgtggagctccagattggcctgaagaattatgacccccagaaggacaagcgtttcagcggctctgtgaagctgccttactgcccccgtccccacctgaaggtgtgcgtgctgggtgaccacaagcactgcgaggaggcccagaacgcgggcattgacgcgatgagcgtggatgacctcaagaagctgaacaagaacaagaagctggtcaagaagctggccaagcagtatgccgccttcctgtcctctgacagcgtgatcaagcagatcccgcgtctgctgggccc

SEQ ID NO: 604 - DNA, 400 bp, Chlorella vulgaris
  unsure (1)..(400): unsure at all n locations
ccaacgcgtccggcgagagcaagagcatgcagagcaaggactgggtggacccccagggccgcaagggcaagggctttggcgtctaccggtttgccaacaagtatggtgccaacgtggatggctactcccccatctacacccctgacacctggtccgagtctggtgacagctacaagcttggcaccaagggcctcattgcctgngctggcctcattgttgtgctactgggcgtgggcatcaacttggtgatctcaacctccgccattggccagtaaacccacccctgactaccttgcccagggcccttcactctggcaaccagggccgcctggttttagtagcttgttgtanagaggcccgtantgcaggatcagcagccgcagcagcagcagccacgaga

SEQ ID NO: 605 - DNA, 306 bp, Chlorella vulgaris
acgatggccgccctgaccgctacctccttcgctggggcccggctccaggccaggacttccaaggtccagccccgcagccgtgctgtggcctgcgtgcgggcagacgctaccaagtatgcagctgctgccatggccgccgtgatcgccctgactcccgctgctgccaacgctggcattgttgaggacctgcttgctaagtccgacgccaacaaggacctgcacaaccagcagcgcctggccagcagcaacgccaactttgcgcgctcgcgcaccgtcagcgaccgcacctgcaccttccccaacaac

SEQ ID NO: 606 - DNA, 363 bp, Chlorella vulgaris
acgcgtccggagtagcgtccgagttgtgcagcatggagagcaaggtgtccggcgaggtgctgcgtgacggtatcgctggggtgctggagggctccaagtccaaggcccgcaagttcacggagaccgtggagctccagattggcctgaagaattaggacccccacaaggacaagcgtttcagcggctctgtgaagctgccttactgcccccgtccccacctgaaggtgtgcgtgctgggtgaccacaagcactgcgaggaggcccagaacgcgggcattgacgcgatcaacgtggatgacgctcaagaagctgaacaagaacaagaacctggtcaagaacctggccaagcagtaaggccccttc

SEQ ID NO: 607 - DNA, 315 bp, Chlorella vulgaris
cacacgcgtccgcccacgcgtccgcggacgcgtgggcttgcattgctaggtttgtcttgagcttcgcccgacaaaatgtcgagccaacttgtgtgggagcttgtgaagcacaacaacgcattccttgtgaagggcgtgaacggcaccgtgttcagccgggaggctggtaacctgtataaccgcaactcctacaagtattctggcctggccaacttcaactccactgtggatgttgctgcggctaaagatggcggggtgcaagtgtccaagtcccgtggcaagaacgccagcaagcccagcgctggccgtgccgtg

SEQ ID NO: 608 - DNA, 382 bp, Chlorella vulgaris
cccacgcgtccggcgattcgaactaacgcctatccgaggcttcctcgaagacagaagacatcaacatgtctgacggaggggacaccccgaaggccgccgaggcccccgccgccgccgcggctcccgcccccggcgagcccatggacatcaacaccgccatccagctggtgctcaagaaggcgctggctcacgacggcctcgcacgcggcctgcacgaggcctgcagggccattgagcgcggccaggcgcagctgtgcatcctcgccgacgactgcaaccagcccgactacaagaagctgattgaggccctgtgcgccgagcagagcgtcaacctcattgccgtgcccgaccccaagaccctgggccagtgggcaggcctgtg

SEQ ID NO: 609 - DNA, 278 bp, Chlorella vulgaris
  unsure (1)..(278): unsure at all n locations
cccacgcgtccggacggcatcaacaatgccgtgtcagacctacgaggagtgatggagcaggaggaagcaggggagatcaagtccaagatcaccgctgtgcagcaggcggccatgaagattggcgagcacctcgccggcaagtcgggcggctcagacggcggctcctcagagaatgtccaggatgcggaggtgaaggataagtgaagggactaagcaaggccccttccggaggctcctgtcgtangggacccttgcacagangggctgtanaatgactg

SEQ ID NO: 610 - DNA, 355 bp, Chlorella vulgaris
caggacgcgtgggcggacgcgtggggttggctgggtggctggcagccttggcaacagtggctgtgcttcaagacggcatgacagcatgcacctggggtgtggccagggatggctggctggctggccccttctcttgaccatgcttgtgtttggtgcgcgccaggcctgctgggtggtagcagtgagcggtgccagggcatttttcttagacgggtcattccaggaggccaaatgacagccacagcgacggctagagtgccttgagaggaggggatgacgcaatttggcgcctgtgcgttgcaggctgctatgcgggcccgctggggctttttgcacaccttgtcagcagttacca

SEQ ID NO: 611 - DNA, 347 bp, Chlorella vulgaris
cggacgcgtgggtttgtggagggctaccgcgtcaacggcggccccgctgggaccggcctggactctgtgtaccccggcgaggcctttgaccccctgggcctggctgacgaccccgacagctttgccgagctgcgtgtgaaggagatcaagaacggccgcctggccatggtttccatgctgggcttcttcgtgcaggccatcgtcaccggcaagggccccatcgagaacctgaacgaccacctggctggccccggcaacaacctgttggccctgtccggcaacctggccaacttaagctactggctcccccggtcaaaagccccggcccccttaaggaagggaatcct

SEQ ID NO: 612 - DNA, 382 bp, Chlorella vulgaris
aggacgcgtgggcggacgcgtgggcgctggtagcagcaagctcggcaggatggtgcggatttcggtgctgggcgatgccctgaagactctctacaatgctgagaagcgcggaaagaagcaggtgctgcttcgcccatcctccaaggtggtcatcaagttcctccaggtcatgatgaagcatggctacattggtgagtttgagtttgtggacaaccaccgctctggcaagatcgtggtggagctcaacggcaggctgaacaagtgcggcgtgatctctcctcgctacgaaatctctgctgttgaaaattaagactggaattgtcccctggttgccttcccgcaattttggcaacttcattcggacaacttccaagggcatcat

SEQ ID NO: 613 - DNA, 380 bp, Chlorella vulgaris
  unsure (1)..(380): unsure at all n locations
accacgcgtccggcggcggaaagcaccaagatggcgaaggacaagtctcgctccgccgaggtggtgacccgcgagtataccattaaactgcaaaagaggctgcatggcataaccttcaagaatagggctcctaaaggccatcaagagattaagaagtttgcccagcatcaaatgaagaccagcgacgtgcgcgtggacttcaagctgaacaaggccttgtggagccagggcatcaagaacgtgccaaaccgcctgcgcattgtgatcaagcgcaagcgcaacgaggacgacgacaagaaggaggaaatgttctccctggtcaccctggccgaggaccaaagcagcaagggcaagggcttggtggtcctgnaggcataaac

SEQ ID NO: 614 - DNA, 401 bp, Chlorella vulgaris
ggtcgacattccgggtcgaccacgccgtccgagctattgccaacgcctacggtgccggcatgaccgactggaacatggcgagcctgtacggcaagctggccatcttcatctttgccgcctggggcggctccagcaatggtggtgtgattgcgggtctggcagtgtgcggtgtgctgttctcctcggtggcgtccgcctcggacctcatgcaggacttccggacaggctacctgaccctctccaacccgcgcgccatgttctttgcccaagtcaccggcgccgtgattggctgctttgtggcgcccctgagctttgagatgttctggaaggccttccccctgggcgtgcccgggtccacttactccgcgccctatggcacaatctaccgcgccatgttcatc

SEQ ID NO: 615 - DNA, 394 bp, Chlorella vulgaris
cagcggctgtatcacttctccttatcctgccttcaacagatacagttgcactaagatggcccccaccgctgtcatgcagctgcaactgcagcaggttcgcaaggtcactcgccaggccgcctcccataaggcctttgtggctgcccctgtcgccaggaaggccagcgtgcagcccgcagccatcagccgacccgcccccagccggagggtcgctgtcaaggctgttgccgaggccaaggcccctgcagcaaccgcagccagcacccaggagtgggaagcctgcgttgccaacgccgagtttttctacaacgacgtccagaatgagcctttcgctgagcaactgcgtgagaagaagacgtggtttgaggaccacgacaaggagctggacttttac

SEQ ID NO: 616 - DNA, 258 bp, Chlorella vulgaris
acgggacaatggggagccaaggggcacagggataggccaatgcggccgggcaaggctaatgggttcgctgctcggtggtttccagacgcccaagctacgcagaatagagcactgatgcagcgctatccggcctggtccaacatcacatacccgcactgagattgctgctgtgagtcgccacatcagagtcttgctaactgcaagggaacgtgcagtagcaccactagtcaggctgcaggcaccggcagacattacatg

SEQ ID NO: 617 - DNA, 360 bp, Chlorella vulgaris
cccacgcgtccgttcagatcttgtgctttcttgttaatagttatcgaggggacaatgcaggccactatgtcgagggtcgctctgggcagcatcgcgggcctgaggcccgctgctactgttcgtcccagggccagcaggacggtggtgagggccatggctgacaagccggcccctggcagcctgcaggttgtagcgcccatcaacggcgacccctacattggcatgctggagacccccgtgacctccgcacccctggttgcctggtacctttccaacctgcccgcctaacggaacggggtttcccccctggtccgccgcgttgagattgggcttgcccaaggcttcctcctggtccggccc

SEQ ID NO: 618 - DNA, 312 bp, Chlorella vulgaris
cactggcgactacggctgggacacctctggcctgtccgccgatcccgagaccttctcccgctacagggaggttgaggtgatccatgcccggtgggccatgcttggcgcccttggctgcgtcgtgcccgagctgctggaccgcaacggcaccgtcaactttggcgagaacgccgtgtggttcaaggccggtgccgccatcttcggcgatgacgggctgaactacctgggcaacccctccctcatccacgcacagtccatcgtggccgtgctgctctcccagattgtgctcatgggcctggttgagggctaccg

SEQ ID NO: 619 - DNA, 385 bp, Chlorella vulgaris
caagtatcaattgaaagcgcactaaccttcgaagatgtctgtctccgtggcctcgtgtaggccttttgtgcaggcctgtcggagtgtgcatataccacgcaagcatcgctttgtaccgacagctgccctgtctaaagaagtacgggagctacgcgccgtccagagcacactccttggtgcagcagctcttgcagcaagcctggccctgagtgccagtcccagcatggctgagcccaagctgccgcccttggacaccgaccctaaccggtgtgagccggcatttgttggcaacactataagacaaggcaaccccgtgtcaaacaagaatccgggcctccctttccggtagccgggttggaaagacctgtccgggaaaaacccaacc

SEQ ID NO: 620 - DNA, 372 bp, Chlorella vulgaris
  unsure (1)..(372): unsure at all n locations
acgcgtccggactttgatgccgcgcccgcccccggcggctttgangcggctgctgcccccgctgcgcccgtggagtacgctgcccagcccgcgcaggatttcggtgctcagttctgagcagagtgagggttgcaggcagggatgtaggctgctgccgcagcacgtgtctcgctggataagtgggcttctgcggcccgctttggaacagcgcacagcatggatagcagagcaggcaggactggaggaggaaaccaagtcgagcagctgtgaccggaacaaaggggagcaggcagctgctgcgctggctaactgtttgtcagttgaggctcaagtcagggtgtaatgaccattagagaaaaaaaaaannaaaaa

SEQ ID NO: 621 - DNA, 320 bp, Chlorella vulgaris
gttcaggaagacctgcaccagctccctggggccaaggttccgtcatgctctacccagccgtatctagtggactgaagcggcgccgccagctggcgggcagcatgcacggcagcagtggcgatgcgcggcagctgtgccggagcaaactggagtgagggacgggccccgcgcactggcaggggcaggtgcttcggtgggctgtagcaagctcagcacagcacagcatggcgcagcagccgtgctatgtgtggtgactgtgcatggagcggggacaggagctggggctggccggctgtgccacggtggcacaggcgcagctg

SEQ ID NO: 622 - DNA, 346 bp, Chlorella vulgaris
  unsure (1)..(346): unsure at all n locations
accgatccccaaaccttcgctgcctaccgcgaggttgaggtcatccatgcccgctgggccatgcttggcgccctgngctgcctgacccccgagctgctgcagaacgccggcgtggccagcttcggcgacgctgctgtgtggttcaaggctggtgcctccatcttcggcgatgatggcctgaactacctgggcaacccctccctggtccatgcccagtccatcgtggccaccctggccgtgcaggtcatcctcatggctcaggctgaggctttccgtgtgagcggcactgccccctggagcggcgaggagctcgacaccctgttacccggtgatgcctttgaacccc

SEQ ID NO: 623 - DNA, 350 bp, Chlorella vulgaris
ttcgggccgtccacccacgcgtacgaggacgcgtggggaacagcctaccaatccatttccgcgggcctgcttggaattcgagcagcaaatgctgcgccaggcagtaagggctgccgccaagcagtgccgcagcgctgctatccccgcaagtgcagccttggccactgctggccgcagtagtgttgcaactctcgctggcttgctacaccatggcagacccatggccagtacagctctcctgtgccttgctgcgacgaccatgggcggctcagtagcatttgctgcctcaaaccaggagcgctccttcattatggtcaagcctgatggtgtgcacaagggtctggtggggg

SEQ ID NO: 624 - DNA, 218 bp, Chlorella vulgaris
aaaagctggcgcacggggagctggtcaccacagagaactggctgcggcacgggcccctcaggatcggtgtcacctctggtgcctccaaaccagacaaagccgttgaagacgtgctggaccgcctgttcaagatcaaggacccgtccttcaaaggcgttacccccaagaagacagcagtgaagaaagcagctcacgaagagcactgagcaagacattgc

SEQ ID NO: 625 - DNA, 349 bp, Chlorella vulgaris
gagcgccacctggtacgagaccggcgctgccatgctcaacggcggcaccctcaactggtttgcagtgccctggggcattgtgaacaaccccctgccactgtttgccgtggttgccatcaacaccgccctgatggccgctgttgagaactaccgccgcaccggcaccggcccctctggctacgcccccggcaccggcaagtttgactctgagatctttgacagcctggacaacctgtaccccggtggtcccttcgaccccctgggcctggctgacgacccagaggtctttgaggagctcaagggcaaggtgatcaagaacgggcgcctggccatgggctccatgctgggc

SEQ ID NO: 626 - DNA, 380 bp, Chlorella vulgaris
cgggcctcgttgcggcgttcccaacggctggaaggggcacccgcaaggtgacccgcccctctgtggagttggacggccctgaccgcgccaagttcctgggtcccttcaccaagcccccctcttacctgaagggtgagttcgctggcgactacggctgggacacctctggcctgtccgctgatcccgagaccttctcccgctacagggaggttgaggtgatccatgcccggtgggccatgcttggcgccctgggctgcgtcgtgcccgagctgctggaccgcaacggcaccgtcaactttggcgagaacgccgtgtggttcaaggctggtgccgccatctttggtgatgacgggctcaactacttgcggcaaccctccctc

SEQ ID NO: 627 - DNA, 421 bp, Chlorella vulgaris
cacccacgcgagggaaacacctgtaaattaggcgtccaagcattaccaccagaagaccgggacgcagggccctaccagcggccctagccagattgggcagaagggagcttcgggtgcctcccagacagttgcggggggagcggtgctggcaaccggcactgaggagcagcggggtgtgcagcagcccaagacctccgctgccgatgtcaagcaggaggtgaggcagtacacccagagcacttacgaggctggttcccaggccccaggcgagattttcaccaagtctaccaccaccagcagctgatgtgtgcaagcaaacctgtgtgatatatctcgccatcacgaggtggcttaaccggctgccataaaccaggaaaggtagtcccagcatgtttggttctatagggtaaatggctgtccc

SEQ ID NO: 628 - DNA, 363 bp, Chlorella vulgaris
ccgcgcaagttcgagcacctccgccacgggaacctgggcttcctgcccatgaagcgctgcaagcgcagcaggggcaaggtcaagcacttccccaaggatgacgcctcaaaaccgccccacctgaccgccttcatgggctacaatgcggacatgacccacatcatccgcgatgtggagaagcctgggtccaagctgcacatcaatgagacgtgcgatcctgtgactgtcatcgagacccctcccatggtggtggtgggcgtggtgggctacgtgaagaccccccagggcatgcgcaccctcaacaccgtgtgggcggagcacctcaacgaggaggtcaagcgcacgttctacaagaactggtac

SEQ ID NO: 629 - DNA, 418 bp, Chlorella vulgaris
acgcatccgaatggcttcgcaggacatcatctccttcttcaagacctgcggccacctgaacgagggcgacatcaagatggtgctgagtgccgacggcacaccgctgggcgaagcttttattaacttcaaagggcagcgggccaaggtccggctggcattggccaaggaccggtcggtcatgccggctgctggcatcgcgattgaagtcttcacatctgttgaggatgaccagcaaagaaggatgttgtcaggctgcatgctggtctagtctggctcgcaattgtagaagtgatgactacgctgtggtgtgggaagagctgacattttcagacacatatggccgggacgatgttcacctctatggagtcagtgtcccacagacgttacccgacttgcacaaacttggattacctacctt

SEQ ID NO: 630 - DNA, 407 bp, Chlorella vulgaris
  unsure (1)..(407): unsure at all n locations
gcacgccactgcacagacgtcctgttaacgcgtgggtgactggcagtcgtgccgctgcagcgcgctggggttgctggcgtttccccttgtgcatctgcaatagtgggtctggccggcacagtgacatgctggctctgggtcgtccagctagccttcctgtttcccatgtggcattgaaatgattatatgaaaggtgtagctgcgagttctcaccacggtaggcaaggcatcatgctgctaccagggctgataagcgagcgcgcgcacttgaggggggtggtcacatgtgcctgaggcgcggcaccccgacgtcattgggatccttttggctgtgatagggagtgcaatgcctgnccgggaagggtcaaatcttgttgcaagttgggcgcctgggtgtccaagaatca

SEQ ID NO: 631 - DNA, 418 bp, Chlorella vulgaris
ccatgcatccgaaatgagtcgacagtgggatataagcagatgcagaaaaagaaagatagtggttcaaggtgaagcaacaagtttcgattcaacacagggccgccttcccacactgtacaacgttggttccacgtccacgcaagcatggagtgctcctatacggtcttggaagttgatgtccatgtccaaccttttgacatgtcgtcacaggcaaaatcataccttcacgtgcggtatccgctttacaacccgcacgccttccgctacctgggcaattaccgacgtggcccgctcagtttgccgttcccagtatttggcccgcccttctagggatgtgtacgccccttgtcgcggcccattaaggacgccagattttgtgggaacccgcagccttaccgctaaactttccatcgcccta

SEQ ID NO: 632 - DNA, 381 bp, Chlorella vulgaris
caagggaatcagaaacttgccaaaccgccggcgcattgtgatcaaccgcaagcgcaacgaggacaacgacaagaaggaggaaatgttctccctggtcaccctggccgaggaccagagcagcaagggcaagggcgtggtggtcctggaggcataaacacacacacgcgcctcgcggggggagctgccgcagcagccagctggcaggttccgtgcctggggatcgcgctgggcctcgcgtgggccttgcctttcaaacggttggtgtgggcggcgtttctggcggcgtttagggtctcttgcagacccttggtcgttgtgcaggccccagatgtcgctgtatcgaacccagctggcggtgccctgttgcggtgcttctggctc

SEQ ID NO: 633 - DNA, 342 bp, Chlorella vulgaris
tgcggaagcagcgacgatggtgctgtcgtgcgacatcgatctcctgcatcctccccaggagctggagaagcggaagcacaagctcaagcgccttgtagcttctcccaactcctatttcatggacgtcaagtgccaggggtgcttcaccatcactaccgtgttcagccactcccagacggtggtggtgtgccccagctgcaacaccgtgctgtgcgtgcctatcggcggcaaggcccgcctcacagagggctgctccttccgcaggacgggcgattagtcaggggaggcgttacgctggcatgtggtctcaagaaagtgcgccgccgcggcttgaggactctt

SEQ ID NO: 634 - DNA, 217 bp, Chlorella vulgaris
atctggtgatcgcttgcagatggcggtaaatgtgtttgagcatctgaccgggcagtaccctgtgtttggcaaggccctctacaccgttcgccattgggccatccgccgtacctacaagatctcctgccacataaccgtgcgcagggacaaggccgtgtaatctgctggaggcctgactcaaggttagggagtacgacctgcttcgtcgcaccttctc

SEQ ID NO: 635 - DNA, 415 bp, Chlorella vulgaris
cgtcgtattaacgcgtccgcccacgcgtccggaaggctgccaaggcagctactcaacaaacaggagcggctcagccggtgaacgtgcgagaggagcggctttggactgccaagacaggtcaactgattaagagccgcttcacccaccaaacccaagaggtgtcaaagggacattttgggcaaccccagaaagggtcgagctaggcggcacagggcttttcgccctggtgccctggtgcctgctgtcacccgcaccgcacggaacatctgatgtgctgtttgttgttggctgcgagagtgcacggtgcgtatttattactctccgcacgcggaaggcaaaacagtgcgcttgctggctggccagctgtgctgtacgcactgtgccaaaagtgctgcgctggctccaaattgcggtt

SEQ ID NO: 636 - DNA, 359 bp, Chlorella vulgaris
gtttcctggtgcaccggccgcccactcgagacactcgccccagcttcaggtccaggtggcagcagtagagtgtgacgtggcggtgggtttggcacgagtgttgcacgcctgtgaggttccacagcttggcgaccgcggaaccccctgttcgttgtcatacgctgaagggctggcctttcgtgtgtgagggcagccctgggttactagcgactctgtgtttgtttgtgcatcaaatgatttgttaggtgagcaggacacacagaagagacctgtattggttttgttccggcggggttggccttggccatccttcaaattcactgcttgttattctgctgcatacgcctgctgccctttgc

SEQ ID NO: 637 - DNA, 329 bp, Chlorella vulgaris
gaacggccttggttaatggccggggcaataggcttggccggttggcgacaatcctcgccaagcagctgctcaccgggcagaatgttgtctgcgtgcgctgcgaggagatcaacatctctggcggcatggtcatgcagaaaatgacgtatgagcgcttcctgaacaagcgcatggttaccaaccccaggagggctgcctacaagttcagggcacccgcccgcatcctgtggaggactgtccgcggcatgatccctcacaagaccccccgcggcgcatcatccctgcaccgcctcaaggcctttgagggtgtgccccatccctaacgacaa

SEQ ID NO: 638 - DNA, 320 bp, Chlorella vulgaris
ccctatagtgtatcgtattatattatcagtagcaccatgcagacccagagcttcgccaggggcaccgctctccgcatccccgtgcaggccaatgtggcccggccacagcggaggagcgtggttgttcgtgctgacagattcatcggtagctccactaaccatatcatggtcctcagcacgatgctgcccatcatcgccggctgctttggcctggcccccaatgccaagctcaggatcacttcttctgtcaagctttaccatgccaattccgtgcgtctgcggaccaaccatcctgccagcctcaccgccactgatttgct

SEQ ID NO: 639 - DNA, 389 bp, Chlorella vulgaris
acacgccactgctctggctctgctaagtttgtcttgagcttcgcccgacaaaatgtcgagccaacttgtgtgggagcttgtgaagcacaacaacgcattccttgtgaagggcgtgaacggcaccgtgttcagccgggaggctggtaacctgtataaccgcaactcctacaagtattctggcctggccaacttcaactccactgtggatgttgctgcggctaaggatggcggggtgcaggtgtccaagtcccgtggcaagaacgccatcaagcccagcgctgcccgtgctgtgtctgtaatcacgaagaacgctcgccgcaccaactacgctgtcggcgctgaggcccaacgcgtgcgccccaacctcaaggctgccgttgcccgtgcct

SEQ ID NO: 640 - DNA, 428 bp, Chlorella vulgaris
gagtcgtattatgcaaaggttcctcgaagtctccacaatggccgccgctatgtgccagacctctgttgcccgggccttcgcccctaaggtggctgcccagaagcgccagcgcgctgttgccgcccaggcctatgttggtaactggctccccggcagcgaccgccccgcctacctggagaagctccctggtgcctacggctttgaccccctgggcctgggcactgatcccaagagcctggagcgctttgtggaggctgacgtgattaacggccgctgggccatgctgggcgttgccggcatgctcggcctggacgccctgggctacggcgactggtacagcgcacccctctgggccgtgactggcggcaaggccacctactttggcgcggatctcccttccagttcacctgggcacccccttctccatt

SEQ ID NO: 641 - DNA, 285 bp, Chlorella vulgaris
tcggcttcgcctacgacctcatgtactgacggaggagaggggagcggtctatggcgcagttatgaccggtcgagcggggcatgtgttcggtagtgatgtccgtacggtactacagccgcgacacccgtggtgatgctcagatggggacctgcatccgggcagcaccagcagcacatgctctgagccggtcgcgaagcgttctccaaacgcatccggttgccagggaaaggagaatgcagctgcttgtttgcgtcgagtctattgggttgggttcgggaggggcgc

SEQ ID NO: 642 - DNA, 161 bp, Chlorella vulgaris
tgcacgccactgtagtgcgtcgtgttgccctggtcggtgtctgcctgcgctgtgcggcgtccttgttcgcgccctctgcgcgtctgcctgccgtctgtcgcggcccccccgtgtgttccgcgcgccggccccgcctcgttcctcttgcttggtgccggctc

SEQ ID NO: 643 - DNA, 405 bp, Chlorella vulgaris
ctcactaaagtgagtcgtgttagcccacgcgtccgcccacgcgtccggccgacgccaccatgaacgcgggcacgtgggaccgctccacgtatgtcggcgtcgccattgtcggcaagaccctgggcgtcatgggctttggcaacgttggtggggagcttgccccccgtgccaagggtctgggcatgaacgtggtggtctacgatcccgatgcatccgctgagcgcgccgctgccgtgggcgtcaagctggtgacgtttgcggaggcgctggcgactgcccacgtcttctcgctgcacatgccgcgcagaccgagcatcatgcacatcttcagcgaccagtcctttgccactatgaagaatggaccccgcatcgtcaacgttgcccgcggcggcgtgattgacgacc

SEQ ID NO: 644 - DNA, 323 bp, Chlorella vulgaris
agaatgcagcccaccttcgtgggcaccacccaggcgctgcgcgccagggtctcaacccaggccactcgtggctccaaggtagcaacctccatgcgccgcaccgtcaagtccaagaacgtgaagaccaccgacaccagccagtgatccagcttgtcagccggtccataccagtcatccgtcacgtatgccttgttcccaacatagccatccggaaattcctgtactgaatctagctgtcagaccgccgggtggtgtccagggaccaatgaccttcaatccactaccgccaatattgaggtcatccatgctcgctgggccatgct

SEQ ID NO: 645 - DNA, 449 bp, Chlorella vulgaris
  unsure (1)..(449): unsure at all n locations
tccacgcaaccgcgcaggctcatcataccctgggacttgcctctgcatatactcgtcttcgtcacaagtaaaacatgcagaccgccatgtcccagagggcttttgtcgccgcacagcccgtgcgcgctgcccccaaggccacccgcgcagccaggtgcgctgtggtgctgcgcgcctccgctgaggagtctcgccgcgcagtgctgggcggcctgctggccggtgctgtggccctgaccgcgggcgccgccaacgccgccaacgacattatcgatgaccgcaaggccatcgagaagggcttcaactggacgtatgaggcacgtctacaccnacctgccccagaacgtgcgtgacggtctgatccaggcacgcgccgacctttagggcctcaagaagcgcattgccgtcagcgacaaagaacatcgacaacgagctggaagtcctacatc

SEQ ID NO: 646 - DNA, 160 bp, Chlorella vulgaris
cacgcaaccgaagagaggcacgctcgtttgccaacctctttggggcccatcaacttgaccgttaacgaggtgggaaggtctggctccttcacagtgctgccacgtgtccagccctttcagccttcaatgccactgaatgccacgtttgtgggcgggcggc

SEQ ID NO: 647 - DNA, 406 bp, Chlorella vulgaris
aaccctctatactgattcatctaacgcctcctgctcccggctgctcccaaccaaacctgcaattgcatttcaggggatcacggctgcgaggatcccaggcattacgggacccgatgctcatgggttcctgacttacacgatgccggagggcacgtctggccgacatggcgtgggctggtccgaggtgccgcggtactccttccaggtgccggccggctgggacgacgtctccgtctccattgcagacctgggacgaacagagattgacctgcggttcagcactgatgaccatggcaagctccaacttgtggtggcccctgtgctgcgcttccgcgatgtgggctacaacgcggatctcacgatccacgagctggtccccccaaagagacttatccaaggctttgcc

SEQ ID NO: 648 - DNA, 446 bp, Chlorella vulgaris
gcgtccgaacagactctctctgcccgtttcggcgtccgcgcccctgtctcccggggcacccgccaggtgacccgcgcctccgtggagtggtacggccccgaccgcgccaagttcctgggccccttcaccaaccccccttcctacctgaagggtgagttcgctggcgactacggctgggacacctctggcctgtccgccgatcccgagaccttctcccgctacagggaggttgaggtgatccatgcccggtgggccatgcttggcgcccttggctgcgtcgtgcccgagctgctggaccgcaacggcaccgtcaactttggcgagaacgccgtgtggttcaaggccggtgccgccatcttcggcgatgacgggctgaactacctgcgcaacccctccctcatccacgcacagtccatcgtggccgtgctgctctcccagattgtgct

SEQ ID NO: 649 - DNA, 342 bp, Chlorella vulgaris
accctaaagtgcatcgtattaaagttcccgcaggactgatatgaggcatacccacacccaggatccgctccacaaacttgtgtaccctgttgtaacctgtccgccagaggccctgaaactgcaattttcctggctttgattttgctgcccctttgctttgctagttcattgggctggaatatcccacgctctattcagtttactggcaatgaaggacgccttgcaattgtggtgtacgaggtgcaaatcaaagcatgtgtaacaccaacaacacgcagaacagaagaaacagacagactacccagctcaaaaaaaaaattggcggccaccctaaaggatcca

SEQ ID NO: 650 - DNA, 379 bp, Chlorella vulgaris
ccacgcatccgaaggggctggctcctggacgggtacccccgctctggggagcaggcggaggccattgagaaggaagggatccggcccgatgtcttcctcctcattgatgtgcctgacgagctgctggtggaccgggtggtggggcggcgcagcgacccggtgacaggggagatctaccacctgacgttcaagccgcccccggcagacgtcctgccacggctgatccagcgaagtgatgataccgaggataaggtccggaatcagctgcggacgtaccatgccaatgtggatgccgtggtgggatactacaaggattgcctgttggagatcaccggcaatgaaaccatggacaccgtccttgccgccatcgagagcgcca

SEQ ID NO: 651 - DNA, 366 bp, Chlorella vulgaris
tacaattaactaaattgagtcttattaccattacatcggtggtgccattgcaacattacttgtcattttcttaggcgccaatgatatgcaatgtcttttgctcgtcaggtggtgtaagccttgaagttgtacagggttgcttccctaggtgcacactcccatgtgattttgccttgcagcccttagaccttgtgtgctatatgtcaacgtttgagtatcctcttgcacggcttgcactctgcagtctatccgtaacgcacctggccgggctcgcccttctcggtgccgttggtgtctaagtttcccttcacttctgcctagaagtgcatggtactggaaaatttgtagggaactcactctttgatg

SEQ ID NO: 652 - DNA, 374 bp, Chlorella vulgaris
gcaaacattcgctgcatgtccgaaatttggtgccggaaaactccggaaaactgttggtttacctattaggaggacttcaaggcaaggcaatgacgtgttagtgcttgcctactgcgctttaattgggcttggatgcgggcctgctccgcggtggccgctaagcttggtggggacgcctcgttcacagcgatattgtgtattcgcaaatgggtcgcacgtaggagccaaccctggggctgaaccaactgaacctcaagccggggagaaagctgcaagcaccaggccccctgtgtgccttgccgccctgcggatacatgaggttatggacagtgggctggcaaaccgctatacctgcgctgcctgccaaggcggta

SEQ ID NO: 653 - DNA, 386 bp, Chlorella vulgaris
ccgcccacgcgtccggtgcagcctgctgccgggctggctgcctgaagtatgtgtattggtctgtgtccgctagtgcggtttgtttgtgttgattattattggctgggtcaaccatggcgcctgtctggggcccagtggcattcccgcccctgctctgccgcgccattgtgcggcgtcccctgcaacacaagcttgcagcacaggaacgcatgtgtgtgtgatgctatacacgccaagctgcagcactgccaggcttatgccgcacaagcggctctacatttgtgcgtcccctgcggacccgtccgttcactgccttttccccttgatataccagtgcaattcctccccgccagctccggttttccactcaactgactttgttttca

SEQ ID NO: 654 - DNA, 442 bp, Chlorella vulgaris
tccacgcatctgaaccgcatttgtcctgtttctagcccctggacaagctgatcatgcaggccgttaccatgacgatgaccacggcagtggtgggccaacgcaggcccaccgcaagcctcaactcaaggttccccgcacgcaagatcggagctttgaggctacgtactttcggccgcaccgtaaaggcagaagcaaagcaggattttgacttcgacaccttcctaatggagactgccaacaagttcgagcaggcagagaacaagccggccattatcggctggggtgtggctgcggctgcagccatcctgacggcagagtggttgattcaccttcctgtattcaacgtgctgctgggctttcccatccagctggtcgggctgctggcgctgccatacctgggcatcaagtattatgtggaaggagaggatcccaagcgggatgc

SEQ ID NO: 655 - DNA, 294 bp, Chlorella vulgaris
tattatgctgccgtacgatatgcgagggagtggcggtccatgagctggccaagctgcatgcccggctggcgcaccgtgaccagtcacctcactagcacaagctgcacctgtgtctcattgctccaaagggaatcaccggccagtatgccgtggaggccctcaccttccttgcagagtatcaccactccaagggtgagctggctctggcggagcattacttcacccgcctgctggactttgggggcagcagcaaggagaaggccaagggcagcctgcgggagatacgcaccctca

SEQ ID NO: 656 - DNA, 102 bp, Chlorella vulgaris
gcgtctggaccgagtcctttgacgctggagaggcgacgtcggtgtctgtgcacggcgccaaccggcttgggggctagatccctgctggtcattgtagcgttc

SEQ ID NO: 657 - DNA, 384 bp, Chlorella vulgaris
gcctctggacgtattctttggaatagggtgcaacgcacctgcagcagacaggcctgctttctatttcagctgggcttcgactgaggttggaaacccagatggcagcaaggggtggcctgtccaggctgtttgagcccgcctatgcctggatggcaacccgctaccaggcggctctgagcaagcagcttgtcaaatatggccttagatacgaggacctgtatgacccacagcaggacctggatgtggacgaagctccgaagcggctgccccaggaggttgtggacgcgcgcaaccagcggctcaagcgcgcctccgacatctccatgaagcactcggagctgccaaaggacatgcagaagctgcagacgccctttgagcactaca

SEQ ID NO: 658 - DNA, 447 bp, Chlorella vulgaris
cccacgcgaccgaaacatggtaagtgatccatctggccagttcccgtatggcgcctgacttgtgcacatggtggcgttgctgccaagcagggcatatgttataatggcaggaggtggtgcgaataaaggttaggtaggtagaagtgtttggacagtctgaatgcagcgtatattctgtggcttgcctgagcttataggccaccatatgtctccccaagacaagcttagaccatagggcgtttgttgatggtcgggaggcaatgcaaacagaggagaggtagggtgagccgcacggatagggctgatgcacttatgctctggagcttgcctcaattcaaatcctgcgggtctcccgctgagtactgtttgtggtggtgtacagtgtgcaaggaatttgtagcccggaactatcagtgcggcatggaaatgatgcctaagagcttgact

SEQ ID NO: 659 - DNA, 356 bp, Chlorella vulgaris
tctggccaattcccgtataagcgcctgacttgtgcacatggttgcgttgctgccaaccagggcatatgttatcatggcacgacgtggtgccaataaaggttaggtacgtagaagtgtttgttcagtctgaatgcacggtatattctgtggcttgcctaatcttatccgccagcacatgtctcccccattccacacttagactataagccgtttgttgatggtcggtaagcattccaaacacttcgacatgtagggtgacccgcacggatacgcctgatccacctacactctggcgcttgcctcaattcaaatcctgcggctctccccgctgactaccgtccgtggtcgtgtccact

SEQ ID NO: 660 - DNA, 219 bp, Chlorella vulgaris
tgtggtgctgggagcgatttaagtttactccgcttgggtgtactggggctccctaaccccaatccccatgtgcactggtttgccgggttatgggagtgtctcgtctgacacccattccgcgcaatctaagattgatacgcggccgatatactagctgggcagattgcctttaacgcgctcaacttgaggattcatacctccatatccatgttcgcgatg

SEQ ID NO: 661 - DNA, 328 bp, Chlorella vulgaris
  unsure (1)..(328): unsure at all n locations
cccacgcgtccgcacacgcgtccgcccacgcgtccgcccacgcgtccgtttcattccaagggctgctcgcgcggcgtgtgctgccagcaaggcagcaaggattggtggtagcatggagggcacccgcagcggcggcacgagtggcggcagcggtgctggtggtgtgcgcgcttgagcagggctgcggctgcggctgcctagcacacgcagcatgtgttgggaagcacttctgtctagatgcaagtgtaaccaagcagtgaggctactgtgtaagggcaacacaccanannagcagacacacacacaccaaaaaaaaaaggggcggccg

SEQ ID NO: 662 - DNA, 312 bp, Chlorella vulgaris
  unsure (1)..(312): unsure at all n locations
gggcngacgcgtgggtagtgacaagaaatgtaaggcaagatggaatttatcagtcccgaaggtttaaggcttgatggaaggcgaccaaaggagctacgacagcttaaatgcgaactgggagtgcttcagtctgcggatggcagcgcagtgttcgagatggggaacacgaaggtgctggcagcagtttttggtcccaaggaggtttcgcagcgctcccaacttgacacaaccggcgccataattcgctgcgagtataccccatgagaccttttaacacaggagagccacacacgcgtgacaacacggcccggg

SEQ ID NO: 663 - DNA, 168 bp, Chlorella vulgaris
cacacgcgtccggtgcactggctgttccgccatgagaggaggttgacaatggatgatatgtgtgtcgttatcatcgtcctagcggattgtacttggcaagctactggctgcagggttgaaggtctatttaggtacgtcggaggaggtcattaccaatttggccctgaa

SEQ ID NO: 664 - DNA, 418 bp, Chlorella vulgaris
  unsure (1)..(418): unsure at all n locations
ccacgcctccgaatggtcgctgggtccaatacagaagcaatcatggcggacgcaggggagcacanaaagaggacgttccgcaagtacacctaccgtggtgtggacctcgaccagctgctggacctcagcactgacgagctaatcgagctcttcnccgctcgtcagcgccgcaggttccagcgcggcctgaagcgcaaggccctggccctgatcaagaagctgcgcaaggccaagaaggaggcgcccgctggcgagaagcccgagccggtgcgcacccacctgcgcaacatgatcatcatccccgagatgatcggctccgtcgtcggcgtgtacaacggcaagaccttcaaccaggttgagatcaagcctgacatggttggcacctacttggctgagtactccatctcctacaagcccg

SEQ ID NO: 665 - DNA, 272 bp, Chlorella vulgaris
ctggcctctatctcgacccagctgatgtctggcggctttgacgagcgcaccgccgcggcctatgccctgctgggcccgctgcccaagcagctcagcgcggccggcgtgcgcggcgactccctggtcgagtttgttggctcctggctgctcctggcccccgacgcacacctggagctggagtccaagcagcgcctggcagagtatgtgaaggagactgcccaggccggcgactctgccgctgtgcgcgggctggctgacggctgggtgtccct

SEQ ID NO: 666 - DNA, 312 bp, Chlorella vulgaris
acgcgtccgcggacgcgtggggttttgggctgtccgtcgccaagaagagcggcagacaaaatggatacgcccgtgaagctggccatcgtgatgaaggtcatcgggaggactggcagccgtggtcaggtgacccaggtgcgcgtgaagttcctggatgaccagaaccgcctgatcatgcgcaacgtcaaggggcccgtgcgcgagggtgacatcctgaccctccttgactctgaacgcaaggctcgtcgcctccggtaatgcgggaggagctgggggcgctggttcaagatgtgacccctgggcgcccggaaa

SEQ ID NO: 667 - DNA, 129 bp, Chlorella vulgaris
cccacgcgtccgcccacgcgtccggcgtctgcccagccaacacccgtctgcgagatgttgccagcagcagcactcagccggtcagcttgcctggctgtgctatcagcagttgtaagctaaggttgcatc

SEQ ID NO: 668 - DNA, 440 bp, Chlorella vulgaris
ccacccacgcgagcgaaacccatcagcttccagccgtcggatgcgatcctcaaggcggcggtggatgctggtattgagaaggatctggtgctgggcgaccccaccgcgccccgctttgtgtactgggatggcaagctgcggcccaccccctcgggcctggacgcgttgacgttcgacctgatgagcatctggggcaagattcgcgcggggctgggggtggtgggcctcaaggctcccatgccagatttcgaggagaacatcgagcagttcatcaagcgcaacctgggtgatgaggtcttctaccgcctcatagagcccttctgctcgggcgtatatgctggcaaccccgccaagctgtccatgaaggcggcatttggcagggtttgggacctggaaaaaaagggtgggaccatcatcgggggacctttcaagctcatgca

SEQ ID NO: 669 - DNA, 353 bp, Chlorella vulgaris
gctgggcctgcgcaagcgatcgttgctacgggtgtttggtttgggctcagtgagcgaatacgtggtgaagcatgcaggctgcaacgtgattgtacacatgagccccttggcagcccagactactgccaagtatagtatttggcttgtgcatatgatgatatgaaggccatgcaggacttgctggaggtacaagtaccgacagttggcaagctgacagcactgcaaggcctccgtgagtattcgaccgcgcttcagcagtccccgtggggtggtttgaaggcaccagccctgcctgtgtgtcctttagggccgggttctggccaatgttaccgcgtacctgtcctgcaagttcc

SEQ ID NO: 670 - DNA, 459 bp, Chlorella vulgaris
ttcgcggggtcacccacgcgtccgcacacgcgtccgggtgaagtacgctaaggaggtggacaacgccaccaaggccgccaaggcccgggggtctgacctccgcgtgcacttcaagaacacgcgcgagtccgccgcagccatccgcggcaagagcctggtgaacgccaaggcgtacctggaggctgtcattgatcacaagcgctgcatcccgttcctgcgctacaatggtggcgtgggccgcaccagccaggctaagaatgagggcaacaagatcggccagggccggtggcccaagaagagctgcgagttcctgctgggcctgctcaaaaatgccgagagcaatgcagaggtgaagggcctggacacggacgccctgtacgtgtctcacatccaggtcaacaaggcgcaaaaggggcgccgcaggacctaccgcgcacacggccgcatcaacccctacat

SEQ ID NO: 671 - DNA, 445 bp, Chlorella vulgaris
aagacgcgtgggcggacgcgtgggcggacgcgtgggctgaggcaagccgggaatcgagttggccttgagccgacgcgtttgacgcccgcagcagcacctaacacacgcaccaggcaccatgctcatctccaagaagaacaggcgtgaggtgtacaagttcctcttcaaggagggtgtgctgtacgcggagaaggacttcaacctgccggagcaccccgagattgagggggtgtccaacctggaggtcatcaagctgatgcagtccatgaagagcaaggacttggtcagcgagcgctatgcctggcgccactactactggttcctgacggacgcgggcatcgagcacctgcgtgagtacctgaacttgcccagcgagattgtgcccgccacactgaagaaatcgaccaggcctctggagcgggagggcgcacgcccgccgcgcggc

SEQ ID NO: 672 - DNA, 372 bp, Chlorella vulgaris
ctgcaagtccctataatgagtcgaagtaggcgtcatcatcttctactcgggcaagcctatcaagagcctcaagtgggtccttcaactcccctggcggccggtggcgctcaacccggcaaggtttggggtgacgggtaccggctactttccaagcggggggcatttttggggcgcttgtaccctacgaggaccgcccctggtgcaatgagatcatctgggacacctccggctgctgcagctccactgacaacaagttctgggagatcatcaagggcctgtttggctacacagaccagccaaccaacctgcagctgctgtactactgcctgtactggttcatcgtcatcatgctgctggtcttcaagtggtgga

SEQ ID NO: 673 - DNA, 370 bp, Chlorella vulgaris
aaaacgtcgccatggcttcaaaaaggaagggcggcgttggtggcaacaagttcaggatgtcgctgggtttgccagtggccgcaacaatcaactgcgctgacaactccggcgccaagaacctgtacatcatctccgtggccggctggggcgccaggctgaaccgcctgcccgccgccgcccccggcgacatggtgatggccaccgtgaagaagggcaagcctgacctccgcaagaaggtgcaccctgcggtggtggtgcggcagcgcaagtcctggaggcggaaggacggcacctacatctactttgaggacaatgcaggcgtcattgtgaaccccaagggcgagatgaagggctccgctattaccggccc

SEQ ID NO: 674 - DNA, 379 bp, Chlorella vulgaris
  unsure (1)..(379): unsure at all n locations
ccacgcgctccgcacaacttgaactcacggccaagccactccttcagcacaggcagaaacccaaaggacaatggccaatacccaacaaaccggccggcaaaatggttggccgcaaaaccttcaagttggaaaaaacactgaaaaaggcccccctggaacaagtacctggcaggcggcctgaacatggaggcgatcaccacccaagtgaccgatggcaagggggccatgcctgcgtggggtgaccggctgagcgaggangagattgaggcggtggccaactatgtctttgaccaggcctccaacaataagtggtaagggggtgaagccttaccaggctgagataaggatggccggtatcccagaggcacttacacatttt

SEQ ID NO: 675 - DNA, 368 bp, Chlorella vulgaris
cacacgcgtccgcggacgcgtgggcggacgcgtgggacgttggtgacgacaggaccccgtccgcatggtattcctcactccctcccctaacaagactgctcttgacaacctacctgattacagggctaggcatgctggttggcctgacgccgctcaggcatatgtacctggactggggcctagttttccggaaccccctcaagcggcctcctcaggtgtggcggctgctgaccaactttaccttcattgggaagcccagcatgcattacctcttccagctgatttggctggtccagtacgggggctcacttgaggcggctgactaccagcacaacgctgcggacggggtgttcatgctgcttgtgggc

SEQ ID NO: 676 - DNA, 235 bp, Chlorella vulgaris
cccacgcgtccgcccacgcgtccgcggacgcgtgggtttggacacatcttcattatttgcaccagtgggaagagcgcggctgagatgcttggctctgtgagaaggaggtaatacaaggaacccctgacagagctgaacaatgcatcctgcaggcaaatgaagatcacacagctgctgttgcgcaatgcctatggttgcacaagttgaacagttgggtcccaggctgatccgaggg

SEQ ID NO: 677 - DNA, 155 bp, Chlorella vulgaris
cggggccacccaagcgtccggaaaaagtaagattagaaaaagaataaagaaatgaaaaaataagaaaaaaaaagaagaaaaaaagaaaaaaaaaaaagaaaatgaaaaaaaacaaaaaaaaaagtgaaaaagtaaaaaaaaaaaaacaattttac

SEQ ID NO: 678 - DNA, 96 bp, Chlorella vulgaris
ccacgcgtccgcacacgcgtccgcggacgcatgggtggtcgcgatgggttgtacatgggttatctggtttggcaattgtttgcgtttcatctttga

SEQ ID NO: 679 - DNA, 213 bp, Chlorella vulgaris
cccacgcgtccgaacacgcgtccgaaaaaaaaaaaaaaaaaaatatagcaaaaaattcaataaaaaaaaaagagaaaaaatgtaatactccaagttactgaaaagtatgagcaacacgtttaaagctgaggttggcctatgtctgctcgcgcttctcgcggtctggtggtgcaggcctacaatgtcagcctcatagtttttcatcggcgtgag

SEQ ID NO: 680 - DNA, 242 bp, Chlorella vulgaris
cgtgtgattgccaagtaaagaccagtttatgcaggcaaaaatgtggtgttatatgccgccttgccaaccctatttctggagtgggctacccctgtgcttggggttgacttggcaggtgtccacagtcgcttgtatggtgtggcataatgatccagtagcagaccatattggtgtgcctgacagcagcttaagctgttccgttttggcaatgccttgaacattgaggggctcactaaattgtt

SEQ ID NO: 681 - DNA, 340 bp, Chlorella vulgaris
gaggctgccccaggaggttgtggacgcgcgcaaccagcggctcaagcgcgcctccgacatctccatgaagcactcggagctgccaaaggagatgcagaagctgcagacgccctttgagcactacatgaaggatgccttggagcaggtgcgcctggagaatgaggagcgcatcgagctcaacaccagcaagccgtacgaccgccagctgccctgaggggtgaaaagcccgtgggaggcaatgctgagcttctgagcgtggctggagtcgttgccctgctagcccagtggtgcttggcttgggttgtgttaaacgggtgggctggcaggctgggttttgcac

SEQ ID NO: 682 - DNA, 451 bp, Chlorella vulgaris
  unsure (1)..(451): unsure at all n locations
ttcgcggggtcacccacgcgtccgcacacgcgtccgcccacgcgtccgcccacgcgtccggccgacgccagcatgaaggcgggcaagtgggaccgctccacgtatgtgggcgtctccattgtcggcaagaccctggccgtcatgggctttggcaaggttggtggggagcttgcccgccgtgccaagggtctgggcatgaacgtggtggcctacgacccctatgcatccgctgagcgcgccgctgccgtgggcgtgaagctggtgacgtttgaggaggcgctggcgactgccgacttcttctcgctgcacatgccgctcacacccagcaccaagcacatcttcaacgacgagtcctttgccaagatgaagaagggagcccgcatcgtcaacgtggcccgcggcggcgtgattgacgnacacgcgctggcccgcgccctggacgccaagatcg

SEQ ID NO: 683 - DNA, 411 bp, Chlorella vulgaris
cacacgcgtccgatcaacatcaacatcgaggatggaggcaaggtcatcgagatccgcaacttcctgggagagaagcgcgtgcgcattgtcaagatgctgccaggcgtgaaggtggagcgctctgcagctgtcaaggatgagctcatccttaccggcaatgatatcgagcttgtcagccggtccacagcactcatccgccaggtgtgccttgtgcgcaacaaggacatccggaagttcctggacggcatctacctgtcggagcgcggcgtgctgtccaaggacgagtgaatctgatccaacagcggcagcagcagcagcagcacttgacagctagcagtggggtgcaagtgtgtgggcggcacaacgggagcgtctaggggcaaggattggggtatgtttaccccgcctgtg

SEQ ID NO: 684 - DNA, 397 bp, Chlorella vulgaris
cccacgcgtccggtgggtccaaaataccctaagaagttcaaaggaccttccgagctatcgagttgctgtcgttgatcacccttggccctccgtacacctgctaggccaccctcaccaggatgcttcgagcagcagcaggcgttctgcgccgggcgaggagctgtagggaggtgtttgccgtgcagtggtgcccagctgccctcccagagctaagtgccgaagggttcccagggcttagagccatcagcagccgctcacagcgggggctccaaggcaaacaggggactgagtgggagatcctagcaaagcagggctacgacgtcaacccctgtcacagcaagctgcacccggcagtcacagaagcaggcatcgagcccgaggaggatgatgagttgcc

SEQ ID NO: 685 - DNA, 343 bp, Chlorella vulgaris
cgcgtccgcggacgcgtgggccctggtgttgggctacagggagcataacataatggggattgacctcaatgccgggggccgcattatgcgggtctacaggaccgccctcaagagcgacaacccctatctcaagctgctcgtgaagctgtaccggttcctggtgcgccggaccgactctgacttcaacaaggtcgtcctcaagcgcctcttcatgtccatgaccaacaggccgcccctgtccctctccaagcttgccaagttcatggccggcaatgaggacaagattgccgtgcttgtcggcaccgtcaccgacgatgtgcgcctgtactaggttcccaagctg

SEQ ID NO: 686 - DNA, 394 bp, Chlorella vulgaris
ggtcgaggattccgggtccacccaagcgtccgaaagcagcagcagtaggcagctgacatttgagcatggccgctgctcgctcccctgccaccgaaagtctgtcgttgcaggtttttgctagctagcttgtaggtgtacgctttgcctcgcgctgctcggcggctggctttaacagaggccaggcgcagggcagccgtgggtatttggttctacatttcgtggggtcgcggatgggcagggtgagggggcaggggattgaaccttgtccccccgccctccagggcctggtgtaggcatcctttttcaacgagaagagcattttccctgaactgacgctggaggccaaacatgccagtcatgtgacgttggacttgcttgtaatcaatatataagc

SEQ ID NO: 687 - DNA, 97 bp, Chlorella vulgaris
tccgcacccctgcacgtggattatctttctcaactgactcagatttgccttaactcccggctactatttctgcatcctttcaagattttctttggtt

SEQ ID NO: 688 - DNA, 278 bp, Chlorella vulgaris
gcgctggggtggtcgctggcagcctgtaacacttggtacagggcactggactgaagggtcaggagcttaagtgttcccgccagccaggtggacgctgcgcactcttcttggactaccgcctttagtacgggtcaggtgtgatgacctgactgtggtcttgctttgtggcatgctttgctgcacatgcagcccttggaataccctgcaaactttgtgactgatgtggaaactgactgtgcggcgcagtccactaaattcaactcattggacatcgtttt

SEQ ID NO: 689 - DNA, 384 bp, Chlorella vulgaris
cccacgcgtacgaccgccctgaccgctacctccttcgctggggcccggctccaggccaggacttccaaggtccagccccgcagccgtgctgtggcctgcgtgcgggcagacgctaccacgtatgcagctgctgccatggccgccgtgatcgccctgactcccgctgctgccaacgctggcattgttgaggacctgcttgctaactccgacgccaacacggacctgcacaaccagcaccgcctgggcagcaccaacgccaactttgcgcgctcgcgcaccgtcagcgaccgcacctgcaccttccccaacaacttcctgagcttcgacctgagcacgtacgccggtgatgtcaacttcattgcacacaagaagatcacccggtgc

SEQ ID NO: 690 - DNA, 262 bp, Chlorella vulgaris
cccacgcgtccggaacttgcacacttcaaaacatgaagctgcttgggttgacaacaagcgtcctgccatgccggccccgggccctccttgtggctcgcgcccacgtcgcccgcaagaggttggtcgtctctgcccaagcagcgattacaaacccctaacctaattcggaggtggttgacataaccttggccaacggcccatggattaaccatgccaaccggccaataagggactgggaatccagggaaaagaaggactcctc

SEQ ID NO: 691 - DNA, 145 bp, Chlorella vulgaris
aagtccctatcgtgagtcgacttagcgactgcgattaagttgtacgctaggtgagacttcgatgacgtggtggtgcacgagatctgccctgaggactacattggcgttgttccctaattgtctcgcttgatcgctcacttggtcg

SEQ ID NO: 692 - DNA, 295 bp, Chlorella vulgaris
caggtagtgagagtgccaccaaagccgccagattgcagaccaccttcgtgggcaccacacaggcgctgcccccaagtgtccacacacagccacatctcggctctcaagtgtcaaactctatatgccgcacagtttaatctcaaaacgtgtagaccaccgagaccacccaatggtacagtctcgaacgccccaagttcttggtggccttctccgacggtgctgtgccttcttacatgatcagcgagttctctggtgactacggctgggacaccaccggcctgttctccgaccccca

SEQ ID NO: 693 - DNA, 363 bp, Chlorella vulgaris
ccgggtccacccacagcgtccgcacacgcgtccgcccacgcgtccgcccacgcgtccggccaaacctgctcaaggagctggagcagtccaccgagccgctgccttacaagctgtggcccggcatgggcggctgccccgacccccacatcccgatcaaggcggagaactaccagctctttgagcagatgcacaacgatgacaggatggcggttgacaagctgaaggagggcatcgacaactttgccaaggaccagcgcaagctggaggagatgatcgtgaaggtggcgcagtaagtgatgagtcagggtgactcaccgctgtaatgagaaatctgacaattggcaattgaaaggaagggtgcat

SEQ ID NO: 694 - DNA, 439 bp, Chlorella vulgaris
ccacgcgtacggacgccctgaccgctacctccttcgctggggcccggctccaggccaagacttccaagggccagccccgcagccgtgctgtggcctgcgtgcgggcagacgctaccaagtatgcagctgctgccatggccgccgtgatcgccctgactcccgctgctgccaacgctggcattgttgaggacctgcttgctaagtccgacgccaacaaggacctgcacaaccagcagcgcctggccagcagcaacgccaactttgcgcgctcgcgcaccgtcagcgaccgcacctgcaccttccccaaaaacttcctgggctgcgacctgggcaagtacgcgggtgacgtcaagttcattgcacacaagaagaagaccctgtgccagggcaccgagcccgggctctgcgctgacgacattaacggcaccaagtttaccac

SEQ ID NO: 695 - DNA, 446 bp, Chlorella vulgaris
  unsure (1)..(446): unsure at all n locations
accacgcgtccgcacgatcaggacacgaaagttcatgaccaaccgcctgctgcagcggaggcagtttatccttgatgtgctgcaccctggccgtgccaatgtctccaagactgagctgcgcgagaagctgtccaagatgtacgacgtcaaggactccaactgcgtgtttgtctttggcctgaagacccagtttggtggcggcaagtccacagggtttggcctcatctacgacaacgtccagggggccaagcagttcgagcccaagtacaggctcatcaggaacggtctggcgcagccggtgcagaagtcgcgcaagcagcagaaggagcgcaagaaccgcnnacaagacatccgcggtgtcaagaagaacgcagtggccggcaagaagtgagcgggcagcagcatgcagccctgagccagcctgcagctctagtaccgcctgtaac

SEQ ID NO: 696 - DNA, 385 bp, Chlorella vulgaris
cccacgcctccgcagacgcgtgagcggacgcgtggggtggaatcccccgtcgacaacaggtccaaggttcacaagatgcagaccctctctgcccgtttcggcgtccgcgcccctgtctccccggggcaccgccaggtgacccgcgcctccgtggagtggtacggccccgaccgcgccaagttcctgggccccttcaccaaccccccttcctacctgaagggtgagttcgctggcgactacggctgggacacctctggcctgtccgccgatcccgagaccttctcccgctacagggaggttgaggtgatccatgcccggtgggccatgcttggcgcccttggctgcgtcgtgcccgagctgctggaccgcaacggcaccgtcaact

SEQ ID NO: 697 - DNA, 333 bp, Chlorella vulgaris
ccgggtccacccaagcgtccgcacacgcgtccgggtggtggtaaccaccagcacattggccacgcctccaccgtgcggagggacgcgccgcccggccagaaggtcggcctcatcgccgcccgcaggacaggtcgtatccgcggtaccgccattgtcaagcccgacaaggagtaagcgttggcaaaggaggcggcggcagcagtgcagccgtagagggctggcgggaatgggcagcggtggctcttggcggcggtgtgctggtgttgcggctgccctacctgcctttagaatcgatgtgtgcagaggtcaaatcttgcagaagaggctgcagca

SEQ ID NO: 698 - DNA, 402 bp, Chlorella vulgaris
ccggggtcacccacgcgtccggagacggtggtcgcagcaggggttgtcagcatggggtctttggtggccaacgagaacttcacgcacatcctgcgtgtgctgaacaccaacgtcgatggcaagcagaagattatgtacgccctgactgccatcaggggtattggtcgccgcttctcaaacatctgctgcaagaaggcggaggttgacctgaacaagagggctggtgagctgagccccgaggagctggagagcatcatgaccattgtggccaacccccgcgcctacaaggtgcccgactggttcctcaataggcagaaggacatccgcgacggccgcttcagccagacgacctcctccgccctggacaccaagctgcgcgatgatttggagcggcttaagaag

SEQ ID NO: 699 - DNA, 374 bp, Chlorella vulgaris
gagtctttcaccatggtgacgcctctcatcaaggtgaagagcgtcaagaagcgcactaagcgcttcaagcgtcaccagagcgaccgtaagatctccgtcaaggagagctggaggcgccccaagggtattgactcgcgggtgcgcaggaagttcaagggatgcggcgtgaatatgcctaacatcggctatggcaccaacaagaagaccaggcacctcctgcccaacggcttctacaagtttgttgtgagcaacgtgaaggacctggagctgctgatgatgcacaaccgcaagtactgcgccgagatcgcgcacaacgtgtccaccctcaagcgcaaggcgattgtggagcgcgccggggagctgaatgtcaagct

SEQ ID NO: 700 - DNA, 381 bp, Chlorella vulgaris
tgggctgcctgacccccgagctgctgcagaacgccggcgtggccagcttcggcgacgctgctgtgtggttcaaggctggtgcctccatcttcggcgatgatggcctgaactacctgggcaacccctccctggtccatgcccagtccatcgtggccaccctggccgtgcaggtcatcctcatggctcaggctgaggctttccgtgtgagcggcactgccccctggagcggcgaggagctcgacaccctgtaccccggtgatgcctttgacccccttggcctggctgacgaccccgacacctttgcggagctcaaagggaaggagattataaaacggcgcctggctaggttctccatgttcgggttcttcatccaggcacttg

SEQ ID NO: 701 - DNA, 460 bp, Chlorella vulgaris
cccacgcgaccgaccacgcgtccggcgattggctagtgccgttcttgacgttactgcctcctgcacaccaacttaaacttgaaggctgtcggtctgataagcaccatgcaggctgtcgctgctcccacaaggcccgcggctttcaccgccgccaggaagccctctgcccgcccggcgactcgccttcacgcgctgaaggcagtagcccagcagcagcctgagagcgaggcacagtggaggctgcagcgccgctcacttgccagcctgctagctgctgcaccggcgctgctgcctgccagccgcgcgcttgccctactgcctgatgatgacgatgaggagctaattgagaaggcgaaggccggtcgcaaggctcggctcgcagcggagcgcgagacgcagcgggcttacgagcgtgctgctggctatgttagcagggcagatgagaagagcctcatcagcg

SEQ ID NO: 702 - DNA, 256 bp, Chlorella vulgaris
cccacgcgtacggagaatactattttgcaatctgttacagcgatattggcgtccatgtatgagttggtctgtagtatcttatttgcatgtcgcctgaccgttgaccattccatattcaatagcagtagagtgtagctaagcagcgtacctgctatctatttgaaattgatgtgaccttaaaaaaaaaaaaaaaaaaaaaaaaaaaaaaaaaaaaaaaaaaaaaaaaaaaaaaaaaaaaaaaagaaaaagaaggacg

SEQ ID NO: 703 - DNA, 413 bp, Chlorella vulgaris
cccacgcgaccggagcaggccgcgatgagcaggtccacctcctgccttccggcatcaagaccctctggcatctccacacccacaccctgccccaggtgaagctccgccaggcacggcatgctgggcatgcccatgccgccttgttgacgcggctgtccatcacacacacaccgttccagggtcagaacactgtgtggggcactgtcccatctgaggcattcatcgacccagcgcacttgccagcgctgcggctgctgcagctgggcagctgggccgatctgacagttgtggggcttactacgcacgacctccttcaggcggaggtagtcggggcctgaacggtgccggaggtcgaggtgcgctggccatctgacggtttcgacgcagttggtctggcaccgttggcactagac

SEQ ID NO: 704 - DNA, 139 bp, Chlorella vulgaris
cacagatggcgcgcgtgatcgatgatctggcagccaggacccccggcaagcggtcgctggcgatggcggcttttgcccgggcgctgcggcagatacccaccatcatctgcgacaacgcaggtctggactcggccgagat

SEQ ID NO: 705 - DNA, 353 bp, Chlorella vulgaris
tccggggccacccacgcgtccgcacacgcgtccggcttcaccatggtgaagtacgctaaggaggtggacaacgccaccaaggccgccaaggcccgggggtctgacctccgcgtgcacttcaagaacacgcgcgagtccgccgcagccatccgcggcaagagcctggtgaacgccaaggcgtacctggaggctgtcattgatcacaagcgctgcatcccgttcctgcgctacaatggtggcgtgggccgcaccagccaggctaagaatgagggcaacaagatcggccaaggccggtggcccaagaagagctgcgagttcctgctgggcctgctcaaaaatgccgagagcaatgc

SEQ ID NO: 706 - DNA, 431 bp, Chlorella vulgaris
ccacgcgtccgcacacgcgtccgcggacgcgtgggcggacgcgtggggtcaagtggcgaatcagtgcagtctccagtctgcgcacaagctggcactttgttcgaacgggtgctcgttgtgaagttgaagatttagcaaactcagcttggattgtgtcagatatcaatgcacgttgattcgacatgggacgccagcccaaccccttcctgaagtcgggcctccccttcatcggactaatgctggggggctttgcgggactgacaatatttatccaaggcaaatacgacatacaggatgctaataacaaggaggttgacctacgagcgccggtgcagaagcagcgagccaagaagttcaatatcaatgaggaattggagaggttcgaaacagcacatcacacagccgtccaagaatatgagaacaaaccggtg

SEQ ID NO: 707 - DNA, 443 bp, Chlorella vulgaris
  unsure (1)..(443): unsure at all n locations
ttccggggccacccacgcgtccgcacacgcgtccgcctgaccctcttgcctccttttcaccatggcctctgcgttgattgccaagcccactgtggcccgcgtcttccagagccgtgcgtccaccgtgcgagccaggagcagcgtgaaggttgcagccgctgagaggcagctgtggctccccggcgcggacgcccctgcccacctgaagggtgacctggccggcgacaggggctttgatcctcttaaccttggaaccgaccccgagcgcctcgcatggtacgcggagggtgagaggatcaacggccgctgggccatggctgccgtggccggtatcctggcccaggacctgctgggcaagggcaactggttcgaggccggctcccaggagtactggctgcccaacaatgcgctgctggccatcgagttcctgntgctgggctttt

SEQ ID NO: 708 - DNA, 400 bp, Chlorella vulgaris
cggtccacccacgcgaccgaggtgatgcccgctggagggtggacgacttgggagtaagcggccgaaatgtgaacaactggcactgggtggagaaggatgccatggaatggagcaagcagcggctgagctcgctgcttgtcggggttgacctgtgcccagcgggggcccccagcctgcacaccaccagcctaagtaaattgggtggtgaggcagttgtcaacaaccggaagaagaaggtcattgctgcttacgagctggacgtgagggtggactgggcaggcaccgtggacggcgaggaggttaagggccaggtccggttgccatatgtgagtgaggagaatcatgatgaagacccagagctgcaggtcaccacatcagatgactccctagccagcagaaa

SEQ ID NO: 709 - DNA, 143 bp, Chlorella vulgaris
tggcatctaggtggcgtgggcttgcgtccccggccaccggctgccagccgatgctggccgtgggccatgatgggaagctgcgtgccttctttgacaagcgtctttctcagcaagttgcgggcgatgccttgtgcggcgatttc

SEQ ID NO: 710 - DNA, 271 bp, Chlorella vulgaris
tctacgagcgcggcaggcggcggctgcaacacgggcgcgagctggctgcaacaccatttggtgacctggggctagcggactcgctcctgtgcgacgccgaggactgcttctctcaggtcctgcagcatcagtccgataacttgtacgccctcggcaacctgggtaatgcgttcatggcatacggcatgctgcgcatgcaaatgctgctggttgcaacgcctgctgcggttaggagagatcccattttcaccaccaggggtaataccggcgg

SEQ ID NO: 711 - DNA, 414 bp, Chlorella vulgaris
  unsure (1)..(414): unsure at all n locations
aggtccacgcaagcgtctggactgatcagcggtcagatggtaacaaccaaaccaaaggatttggcaacgttaatccgtccccgggtcaaaaacccaaaaaagcaaaaccttcaggacaataataaccaaggttgacgctgatggcaacggcaccatcgactttcctgagtttcttgggctgatggcacggaagatgaaggacactgacagcgangaggagctgcgggaagccttcaaggtgtttgataaggacggcaacggcttcatctctgcggcagagctgcggcatgttatgactaacctgngggagaagctcactgatgangangtggatgagatgatcagagaggccgatgttgatggggacgggcaagtcaactatgangaatttgtcaagatgatgctggccaaata

SEQ ID NO: 712 - DNA, 339 bp, Chlorella vulgaris
gactagttctagtgaaacatggcacccaagaagaaggttgcggcccctcctgccgcggtcaggaaggccgctcagccggccaagcccgtgaaccccctgtatgagaagaggccgaagaccttcggtatcggtggtgccctgccacccaagaccgaccttcaccgctttgtgaagtggcccaagtatgtgcgcatccagaggcagaagcgtgtgctcaaccagcgtctcaaggtgccccccgcactgaaccgcttcacccgcacgctggacaagaacatggccgagagcctgttcaagctgctgctcaagtaccgccccgaggacaaggcagccaagaag

SEQ ID NO: 713 - DNA, 428 bp, Chlorella vulgaris
gtccgaacggcgggcaagtagcaaccatgaagctaaatattgcatacccggccaccggctgccagaagaagctggaggtggacgatgatgggaagctgcgtgccttctttgacaagcgcctttcccaggaggttgagggcgaggccttgggcgaggagttcaggggctacgtgttcaagatcaagggcggccaggacaagcagggcttccccatgaagcagggtgtgctgacctcgggccgcgtgcgcgtgctgatgagccccggcgaccagtgcttccgccgctacggccgccgcaacggcgagcgccgccgcaagttcgtgcgcggctgcatcctgtcccccgacctctccgtgctcaacctggtcatcgtcaagaagggcgagcaagagctgccggggctgaccgatgaggaaaaacccaagatg

SEQ ID NO: 714 - DNA, 351 bp, Chlorella vulgaris
gtccggaccgatcagcggtcagaggctgaacggcctgcccgctcgccgccccgacaccctctctcgcatcagcaagtcaaaaaagaccgtccaccgtgcttatggcggccacctcagccatgctgtcgtgaaggagcgcatcatcagggctttcctggtggaggagcagaagatagtgaataaggtgctcaagctgcagaaggccaatgagaaggcagctgaaaagaagaagtgagcagcggcagcgcagtgttgtcgttggcagcagcggacagcgagcagctgcaaggcgcaggcagcgtgcagtgttctgtggcaactggctggttttgcggtgtaacatgaactaac

SEQ ID NO: 715 - DNA, 363 bp, Chlorella vulgaris
agtgatccccgtctcgcaatagttccagggcaatcactatgcaggcaaccatgatgaagaccttcggcgccagcctgcgcaaggctgtgcccacccagggcaagggcacccgccaggtgacccgcgcctccgtggagtggtacggccctgacagggccaagttcctgggccccttctctgagggctccacccccagctacctgaagggcgagttcgccggcgactacggctgggacactgctggtctgtctgccgatccccaaaccttcgctgcctaccgcgaggttgaggtcatccatgcccgctgggccatgcttggcgccctgggctgcctgacccccgagctgctgcagaacgccggcg

SEQ ID NO: 716 - DNA, 394 bp, Chlorella vulgaris
gtccgcaccgacgcaagccagtggtacggtcccgaccgccccaagttcctgcgccccttctccgagggtgctgtgccttcctacctgaacggcgagttcgctggtgactacggctgggacaccgccggcctgtccgccgaccccgagaccgtgaagcgctaccgccagattgaggtcatccatgcccgctgggccatgcttggcgccctgggctgcatcttgcccgaggtcctgcacaggtacagcggcatcgagttcggcgaggctgtgtggttcaaggctggcgctcagatcttctctgacgacggcctgaactacctgggcaaccctgccctcatccacgctcagtccatcattgtcaccctcatcacccaggtggtgctgatgggcgccg

SEQ ID NO: 717 - DNA, 319 bp, Chlorella vulgaris
tccgcacacgcgtccgcttactaaagatcgcagccatgggtggggagcgcgtcaggttgtacgtgagtggcaatatcctcggatacaagaggggcaagtccaaccagaccaaccacacctccctgatcaagatcagcggcgtcaactcaaaggctgagaccgaattctaccttggcaagaagattgccttcatctacaaggccaagaccgagaagaagggcagcctttatcgcgtgatctggggcaaggtcacccgtgcccacggcagcaccggcactgtccgcgccaagttcaggaagaacctgccaaccagctccct

SEQ ID NO: 718 - DNA, 399 bp, Chlorella vulgaris
gccacccaggcgtccgaacgattcgaactaacgcctatccgaggcttcctcgaagacagaagacatcaacatgtctgacggaggggacagcccgaaggccgccgaggcccccgccgccgccgcggctcccgcccccggcgagcccatggacatcaacaccgccatccagctggtgctcaagaaggcgctggctcacgacggcctcgcacgcggcctgcacgaggcctgcagggccattgagcgcggccaggcgcagctgtgcatcctcgccgacgactgcaaccagcccgactacaagaagctgattgaggccctgtgcgccgagcagagcgtcaacctcattgccgtgcccgaccccaagaccctgggccagtgggcaggcctgtgcaagattgacag

SEQ ID NO: 719 - DNA, 350 bp, Chlorella vulgaris
  unsure (1)..(350): unsure at all n locations
ataaccgtctcgcaatagttccagggaatcactatgcanggcaacatgatgaagaccttcggcgccagcctgcgcaagggtgttgccacccaagggaaaggcaaccgccaaggtaaccccgccctccgttgattggtagggccctgacaggggccaattcctgggcccctttctccgagggctccacccccagctaccttaaagggcgagttcgccgggcgactacggcttggaaactgctggtctgtctgccgattcccaaaccttccctgccttacccgaggtttacgtcatccatgcccgctgggccatgcttgggcccctgggctgcctgacccccgagctgctgc

SEQ ID NO: 720 - DNA, 264 bp, Chlorella vulgaris
gtcaaattgccaaggagacgtccaaggagtggaagggtctgcgcgtgaccgtcaagctgacggtgcagaaccggcaggccaaggtgaccgtcatcccctccgccgcggcgctggtcatcaaggcgctcaaggagccgcccagggacaggaagaaggagaagaacatcaagcacagcggcaacctgtcaatcgatgacgtgatcgagattgcgcgcatcatgcgcaaccgcagctgcgccgcctcgtttgccggcacttcaagga

SEQ ID NO: 721 - DNA, 422 bp, Chlorella vulgaris
  unsure (1)..(422): unsure at all n locations
acccacgcgtccgggaggccgcctacatgaacatcccagtcatcgccttctgcgacaccgactctgacctgcagggtgtggacgtggcgatccccgccaacaataagggcaagcactccattggcatgctcttctacatgctcacccgcatggtcctgcagatgcgcggcactgtgtcggctgccaacccctgggacgtgatggtcgacatgttcttctaccgcgagccggaggaggccaaggangagggagccgcggaagatgcacccgccgtggagtacgcgcccgataccggcttccaggcagcgctgccaggtgctgagganggctatgatgcgtacggctacaatgccgcgggcgaagctgccactggcttcgccacggcttcgagcgggcaaccggctttgatgccgcgcccgccc

SEQ ID NO: 722 - DNA, 344 bp, Chlorella vulgaris
cacgcgtccgctgaggcaagccgggaatcgagttggccttgagccgacgcgtttgacgcccgcagcagcacctaacacacgcaccaggcaccatgctcatctccaagaagaacaggcgtgaggtgtacaagttcctcttcaaggagggtgtgctgtacgcggagaaggacttcaacctgccggagcaccccgagattgagggggtgtccaacctggaggtcatcaagctgatgcagtccatgaagagcaaggacttggtcagcgagcgctatgcctggcgccactactactggttcctgacggacgcgggcatcgagcacctgcgtgagtaactgaacttgccc

SEQ ID NO: 723 - DNA, 431 bp, Chlorella vulgaris
  unsure (1)..(431): unsure at all n locations
gccacccacgcgtccggagtgatctaggggcaaggtcacccgtgcccacggcagcaccggcactgtccgcgccaagttcaggaagaacctgccacccagctccctgggcgccaaggttcgcgtcatgctctaccccagccgtatctagtggactgaagcggcgccgccagctggcgggcagcatgcacggcagcagtggcgatgcgcggcagctgtgccggagcaaactggagtgagggacgggccccgcgcactggcaggggcaggtgcttcggtgggctgtagcaagctcagcacagcacagcatggcgcagcagccgtgctatgtgtggtgactgtgcatggagcggggacaggagctggggctggccggctgtgccacggtggcacatgcgcagctgatcggcaacgtgtancagtgccgaagtgtt

SEQ ID NO: 724 - DNA, 394 bp, Chlorella vulgaris
ttccagggccacccaggcgtccgcattcgccaatgctgagacgctgtcgacgatgagcgacgccatcaccatcatcggcggcggcgacagcgtggcggcggtggagaaggcgggcctggctgagaagatgagccacatctctaccggcggcggtgcgtctctggagcttttggagggcaaggtgcttcctggcgttgctgcgctcaatgaggcaaccgccaccgtagcggcataggctgctggtgcacccagagaagatggcctgccctctatgcagcaactggggctggatttagtgtgcgagattgcacaaggccgcactggaggccttgtttacagccaatctttggggtgcatagtccaggggccttccattgggaggaacttcggagta

SEQ ID NO: 725 - DNA, 363 bp, Chlorella vulgaris
actgacatgcctggatttgcgccagtgcggcttgcatgctctggcgccggcggtctcctccttgacatcattgcagaggctaggtctgtccagcaaccggcagctgtcagcggggcttgactatgttcatggcctgggcaagcttaccagcctgtacctgtccaagtgtggcatcagcatgttgcctccagcagtcagcaccctgacagcgctgcagcggctagatgcggctggcaaccgcagccttgctgcaggcctggagcacctagctggactcagccgactaagcagcctgcgcctgggtgggtgtgcattgaccgagctgccgccagcgttcagcacgctcacagctctgcgcaagct

SEQ ID NO: 726 - DNA, 319 bp, Chlorella vulgaris
gcgtcaacggacaagtgggattattctgaggaattccctgaatcgtcttgggcttgagccgacgcgtttgacacccgcatcagcacctaagacactcaccaggcaccatgctcatctccaagaataacatgcgtgaagtgtacaagttcctcttcaaggatggtgtgctgtacgcggagaaggacttcaacctgccggagcaccccgaaattgaaggggtgtccaacctggaggtcatcaagctgatggagtccatgaagaacaacgacttggtcaacgagcgctatgcctggcgccactactactggttcctgacgtg

SEQ ID NO: 727 - DNA, 427 bp, Chlorella vulgaris
cccacgcgtccgctgaggcaagccgggaatcgagttggccttgagccgacgcgtttgacgcccgcagcagcacctaacacacgcaccaggcaccatgctcatctccaagaagaacaggcgtgaggtgtacaagttcctcttcaaggagggtgtgctgtacgcggagaaggacttcaacctgccggagcaccccgagattgagggggtgtccaacctggaggtcatcaagctgatgcagtccatgaagagcaaggacttggtcagcgagcgctatgcctggcgccactactactggttcctgacggacgcgggcatcgagcacctgcgtgagtacctgaacttgcccagcgagattgtgcccgccacactgaagaaatcgaccaggcctctggagcgggagggcgcacgcccgccgcgcggcgacagg

SEQ ID NO: 728 - DNA, 394 bp, Chlorella vulgaris
acccacgcgtccgcccacgcgtccggtccggcgaggtgctgcgtgagggtatcgctggggtgctggagggctccaagtccaaggcccgcaagttcacggagaccgtggagctccagattggcctgaagaattatgacccccacaaggacaatcgtttcatcggctctgtgaagctgccttactgcccccgtccccaacttaaggtgtgcgtgctgggtgaccacaagcacttcgaggaggcccagaacgcgggcattgacgcgatgagcgtggatgacctcaacaagctgaacaagatcaagaagctggtcaagaagctggccaagcagtatgccgccttcctgtccactgacagcgtgatcaagcagattccgcgtctgctgggccccggcct

SEQ ID NO: 729 - DNA, 418 bp, Chlorella vulgaris
  unsure (1)..(418): unsure at all n locations
aaggaacatacggtgttagtcccgtttgggttaaagttgctttcaccgtccgccagaacacaaaatgaagctggtcgctgcttagctgctggctactctgggtggcaaggatgcccccaccgccgaggacatcaagtccatcctgtccagcgttggtgctgaggccgatgaggatcgcctgagcaagctgctttctgagctggagggcaagaacatcaacgacgtggttgcctccggcctgtccaagctggcctctgtgcctgctggcggagttgcctcttcgggcggtgctgcccccgctgctggcggcgctggcgctgctgaggctgctgcccccaatgatgacgacgaagttgatgatgangangatgangacatgggcttctccctattcgactaagcgcacggcgtgacgcac

SEQ ID NO: 730 - DNA, 381 bp, Chlorella vulgaris
agcagcccgcccgctcgtggctgtccaggctctggacggggagtccaccgagcaggttcccctgcccgccgtgttcactgcccccatccgcaacgatgtggtgcgcaacgtgcacaccaacatggccaagaacgcccgccaggcttaagctgtgagcgccaagggcgggcaacagacggctgctgagtcctggggcactggccgtgccgtgtcccgtatcccccgtgtgcctggtggcgggaaccaacgcgcaaggcaagccgcctttggcaacatggtgccccgcggccacatgttcgcccccaacaagacctggcgccgctggcacaggaagatcaacatcaagcagaagcgctatgcggtggtgtccgcactggccgc

SEQ ID NO: 731 - DNA, 387 bp, Chlorella vulgaris
cacccacgcgtccgcacacgcgtccgcgtctctggagccttccccggctgagaaggagacgtcaacatggtggatgccagcaagaagagcaagaggtctcatgagagcatcaactctcgtctggcgctggtgatgaagtccggcaaatataccctgggctacaagaccactctgaagactctgcgcaacggcaaggccaagctggtgattatcagcaacaactgcccggctgtgcgcaagtctgagatcgagtactacgccatgctctcaaagaatggcgtgcaccactacaatggcaacaacgttgacctgggttcagcctgccgcaagctgcaacgcgtgtcagtgctgacaatcaccgaccctggtgactctgacatcatcaag

SEQ ID NO: 732 - DNA, 413 bp, Chlorella vulgaris
cccacgcgtccggtagccatggtggaggcagtgttgcagccaagtcagccggcgcaggggtgcccctgggacggggtctggagcgcagcagccggggcatctgcgctgaggttgtagccgttggcctgtggcctggtaggtgcagattagtgctgcttggcagcatggtcactgctggtgctgtctttgcaatgcatgcggcagaatgttgtaggagaattgctttttgtgcgctgggcgcgtttggggtctttgtagaaaggctgcggccttgcatagcggggccggcagctcgctacccaggccagggagaacgcttgcaagatttgagaaccagccttgtcaccatgtgtgtgtggtggacgggaatgctgacaggcatctagtagggcatgcctctcgggtgttgtggt

SEQ ID NO: 733 - DNA, 384 bp, Chlorella vulgaris
tttaacatgggagcccgcccgctcgtggctgtccaagctctggacggggaatccaccagagcaggtttccgtgcccgccgtgttcactgcccccatccgcaacaatgtggtgcgcaacgtgcacacgaacatggccaagaacgcccgccaggcttatgctgtgagcgccaaggccggccaccagacggctgctgagtcctggggcactggccgtgccgtgtcccgtatcccccgtgtgcctgatggcggcatccaccgtgcaggccaggccgcgtttggcaacatggtgcgcggcggccacatgttcgcccccaacaagacctgtcgccgctggcacaggaagatcaacatcaagcagaaacgctatgcggtggtgtccgcact

SEQ ID NO: 734 - DNA, 456 bp, Chlorella vulgaris
  unsure (1)..(456): unsure at all n locations
cacccaggcgtccgcacacgcgtccggcaaggtcaagaacccctggcccaatgtggatgcccactccggggtgctgctgcagtactacaacatcacagaggagaacttctacaccgtgctgttcggtgtctcccgctccatcggcgtgctgtcccagggcatctggtcccgcgccctcggtctgcccattgagcgccccaagtcgctcaccgctgacgccatcctgtccaaggtcaagggccagtaagcagcgacgtggtcttgccttcgtgaaagccagagctgcatgcgcacacaacagcgatgactgcggggcactgtggtgtgctgggcgggcctagtgagccccgttgtaggccangctggcctggtttctgatgacggcttcaagggccgctctgtcacatgcctgccactatcagccttgcctgttcaagccgcgcctggcgggctctc

SEQ ID NO: 735 - DNA, 453 bp, Chlorella vulgaris
attcctagggccacccaggcgtccgcacacgcgtacgcaactactgcgtctcgtgcggcggcgcaccgccatcatcagcagacgctgcggtcgtcatttgaaacccatggctcacgtcgttgcccttagcaggaatgctgtgttccctaagcctcaggtggcccggatcccacgccctcggccttgcactgccacatacaaggtcaccttcaacatccccaaggaaggccgccaggaaaccattccctgcgatgatgcaacctacatcctagatgctgttgaggcatcgggtgttgacctcggctttgactgcacagcaggtggctgcgccaactgcgctggcagggttctctctggggttgtcgaccaaagcgaccaaatgttccttagtgacaatgagatcgctaacggccttgccatgctgtgcaccagcattcccaagagcgattgtgt

SEQ ID NO: 736 - DNA, 439 bp, Chlorella vulgaris
cacccaggcgtccggattgggcaggaagtggaggtgactaacatccccaacccccgcgtcgaggccgaggagcactactacaacgccaagtgcaccaagctgagggacttaggcctagagcccaacttcctgtccgagggcctcgtcgactcgctgctgtcctttgctgtggagtacaaggaccgggttgactaccgcctcatcaagccagcggtggactggcgcaaggcaggtgtgcaagacgcaaccaacaaggccgcagttgcctcgcagtaacccccaacgaggtgctgcacacagcacagggccgggcaggagcccagtgaccatagctagatggatgcttgccctgtggtcgggacctttgcggcgcccttttgctggctggcgcctcaaggggccctgtggtgagtagtacgatctgagaacaacctcctgc

SEQ ID NO: 737 - DNA, 369 bp, Chlorella vulgaris
gcgtccgaccacacgtccccggacacgtgggcggacgcgttgggaaaaaagatggtggctctccagattctcgcagcgactgccaatggcaccgtcaaaggtaccgttaagggtaccgcaaagcaggcagcgaagaccgtgaaaaaggcggccatcaagaccgcaaagaaggtcgcccccaacaagggtggcgctggagtggtacggccccaacaggcccctgttcctgtgcccctacagccccgagcccccgagccacctgaacggtgagttcgctggcgactacggctgggacacctccggcctgtccgccgatcccgaaaccttctcccgctacagggacatttaggtgatccatcccgctgggcc

SEQ ID NO: 738 - DNA, 351 bp, Chlorella vulgaris
aggacggctccatctacgaccccaaggtgctggacatcaccgacgacgacctgggcgatgtcgtgaccgctgccatccgcaacgtggccgccgcctgcctggccctggacttccccaccctggcctcggtgccccactccctggtcaacggctacaagaacgtgctggccattgccgtggagaccgactacagcttccccctggcacagaacgttaaggactacctggccgacccgtctgcctttgcttccgctgccttcgccgccggcggcgcctcgcacgccgctaccatggacgaggataaggctcccgaccctgacgacgaagaggatgaggacatgggcttctctc

SEQ ID NO: 739 - DNA, 439 bp, Chlorella vulgaris
  unsure (1)..(439): unsure at all n locations
ttcctagggccacccacgcgtccggagatcggatcgttcgccattgccgagtccctgcgcggcgccgctgagggcgagaagagctgctacccgggcttcaaccccctgaacctcttcgctgagggcgacgctgtctttgacggccggaccagggagatcaagaacgggcgcctggccatggttgccttcttcggcattgtgtgccagcacgcagccaccggcgccacccccctggaggctctgaaggcacaccttgcctcncccctgaccgccaacttcgccaccaacggcgtgtcactcaccttctaagctgcttctactcccccattggacggatgtctgctgctgtggcggcggtttaactggaaggctgaaaggcgtgctacgcacttggcatagcttgcaattttgaggttgccaggatgccagtgcagcccgc

SEQ ID NO: 740 - DNA, 257 bp, Chlorella vulgaris
cccaggcgtccgaaaaaaaaaaaaaaaaaaaaaaaaaataaaaaaaaaataaaaaaataaaaaaaaaaataaacaaaaatagtatggtcaaaactttacatgaatgtaaacttatattctcttcaatcatacttcctgttctcatgtatgctactccttttttttaaagtagtcatcctttaaaataatgtgacttgctttaaccaagccgctcgcctgcgcaagcccctttcattaagtttcctttttttcttccc

SEQ ID NO: 741 - DNA, 451 bp, Chlorella vulgaris
tccagggccacccaggcgtccgatcccccgtcgacaacaggtccaaggttcacaagatgcagaccctctctgcccgtttcggcgtccgcgcccctgtctcccggggcacccgccaggtgacccgcgcctccgtggagtggtacggccccgaccgcgccaagttcctgggccccttcaccaaccccccttcctacctgaagggtgagttcgctggcgactacggctgggacacctctggcctgtccgccgatcccgagaccttctcccgctacagggaggttgaggtgatccatgcccggtgggccatgcttggcgcccttggctgcgtcgtgcccgagctgctggaccgcaacggcaccgtcaactttggcgagaacgccgtgtggttcaaggccggtgccgccatcttcggcgatgacgggctgaactaactgggcaacccctccctcat

SEQ ID NO: 742 - DNA, 386 bp, Chlorella vulgaris
gacccacacgtccagtggcagccaatcccagccctcccagtccagtctcgacacttattgcctgccacttcggacaccacaatgatgcagtgcatgtccacccgttctgcgtttgccttcaagagcagggcagcccagaggcccagccgcagccccttcaaggtccaggcctacaaggtcaccttccgtgacgccgccaagggcaccgagaaaaccgtggagtgcggcgctgaggactacctgcttgacattgctgacgccaacaggattgacctgccagccagctgcaggggtggcgtgtgcggcagctgcgtgagcaagctggtgtcgggccagatcgacaacagctggcagtgcgaactggacgacggcaacgtgctttccgc

SEQ ID NO: 743 - DNA, 394 bp, Chlorella vulgaris
atgaacacctctgtgctaatgaagggaaaggctaggggggcttgcagcaatggtggcaccactgcttggggactgctttgtttcgtggctggcattcttgttgcccaccgaatgaagtgggcatgagggatgcaaaggaaggtagatacgcagcaaggtgggcgtgtgaagagcaagggggttgcacaaaatggtgcttgtgggatatgctaccatgccatggtattggtttttggagggtgggggcgattttacgcgtgggggatagctgagagaggcatatattagcaaactttcatctgttgtgccagttcgcgcccagatggccgagtggtctaaggcggctggctcaagatgaggcttgctcatgtcatgagcgtgtgtgtccagctct

SEQ ID NO: 744 - DNA, 414 bp, Chlorella vulgaris
cagggcgggtactggcgcgcctccaagcgttggtgcaagacgctgccggggcagctggtcgacaaggcgctgctgtcctttgcacacaatgagaacggcgtgcgcccggagcacgtgtatggtgggccccacggcgccatctcgcagctgcgggcgctggagtcctggttcgaggtgcagcgggagtttcacttctactcgtcatcggttctcatactgtacgagggcggcgccacagccgcggaggacgccagggtgcgtgtgcgctttgtagactttgcacacacattcaagctggagccgtcgctgcagcagcgggatcacaacttcctgtccggcctgcgggccatcaccggcaggctgtcggccatcctgcgggcacaggcggccgacagcctggcctgagcgcaccgc

SEQ ID NO: 745 - DNA, 460 bp, Chlorella vulgaris
tccacccaggcgtccgcacacgcgtacgcggacgcgtggggtcatcttctacgtggccaacaacaagatcttcagcggcgatggagagctcatattcaagggggttatcagttggatagcctgcttgatgatcactatcgtcgccttcgccatgctcaagttctacaacctggagcgcaagtggcgccacaagttggagtctgcacagagggaggccttcaagaccaaccggtcccacaagtggaccatgatgctgctggccggctctgccacgctgcgtgagggagtggaggcggtgctcttcctgacgggcgtgtcccagggggagggcgtcaagtcgctcatcatccccggcattgtgggactcatcctgggaatccttgttggcgtcatcatcttctactcgggcaagcctatcaagagcctcaagtggttcttctacctctcctgcggcctgctg

SEQ ID NO: 746 - DNA, 431 bp, Chlorella vulgaris
cacacgcgtccgcccacgcgtccggcgcctgacctcccatctcgtgcggctttcgcctttgaagccggcagcaggtcaccatgggtcgcgtcaggaccaagaccgtcaagaaggcttctcgtgtcattatcgagaagtactataaccgtctcaccatggactttgacaccaacaagaggatttgcgaggaggtggccattattcagtccaagcgcctgaggaacaaaattgctggcttcaccacgcatctgatgaagcgcatccagcgcggcccagtgcgcggcatctccctcaagctgcaggaggaggagcgtgagcgtcgcatggactacatccctgacgagtcggccatccagaccgacgcgattgaggttgacaaggacaccctggagatgctccgcggcatgaacatggccaacctgcccggcatc

SEQ ID NO: 747 - DNA, 90 bp, Chlorella vulgaris
acccacgcgtccgcggatgcgtgggcggccgcgtgggccgacgcgtggtccgcggccaggcacggctacatgaatctctcagacattaag

SEQ ID NO: 748 - DNA, 453 bp, Chlorella vulgaris
ttcctaggtccacccaggcgtccgcacacgcgtccgctttagaaagtggtaccgctattagcttgtgatggcggcccgcaccctcctcgttgcggcacttgccgtcgtgctggtcactttcgtggcggcagatggaagcatcgactcggaaatcgaccaccttgagggcgagtgcctagaagagatcaacgagctttgggagaaatatacagagggcccagcggtggagggctgcgacgaggcctgcctacgggagtgctaccagatactccaagacgctgtctggggcaccaagaacaaaaattgccccttgcagtccgagattcagcgttgtttccacgtattttccgatgactgggaggactatgtgaaggagtgcgagcttttcgtcttttcggatagcgagagtgaaggcgagtcatcctccggcgagggtgagtcctcctccaacga

SEQ ID NO: 749 - DNA, 407 bp, Chlorella vulgaris
cacacgcgtacgaacgaatgcatgctggggcgctggtgctgctcgtagcaaggcaaaggcgctgttgaatgaatgtctcgcttgctcgctctcttgctcggaggcattgctagtgagggaccagggtgggtgagggggcggcccgttcccttgcgcaccctgcgacgctgtttatgcttttcatggctgtacagaggcacttggcagttcctacggcacgcattgattggtgttcaaattggctgggagccggtactagggcgcacacatattctgaggagctgggttttagtgagagaccgttggtcggccgagtgtctgtcttccgcgcatgcattttccatctctcaagctttgagcaacgtgcagccgccgagcctttgcagcgggtaggcctgacttgttgc

SEQ ID NO: 750 - DNA, 447 bp, Chlorella vulgaris
ttccagggccacccacgcgtccgcaacagcgtccggcgtcttcatgcttcagttttggcgaggagataagaagcttgtcaagcggttcagctcagtctatgaggccaatcttccagacatggatagcagatttgagaatgggttgtggggcaggccttcacagttgcatggcggcggcatatcatcagcctgttgctagctgttcaatatgtggtttgacagcctctccagcagagtcggccgcggagtgctgctccaaattggtgtatggtgttatctttccctctggccgcttgagctgaagggcctcaaaactgtatatctggtaactgtggaatggttgagagtgctggtgactgccttcaagtgctcctccacaaggttatacattgtatacgtgtgtcagggtgagaggactcgggtctagcacagtaaaaagcgctgacg

SEQ ID NO: 751 - DNA, 385 bp, Chlorella vulgaris
ggccgacgcacgcgtccagcggccgccaccagcttgtcgccgccgccgtggccgacaacaagctgtacgttgccaagatccaggtcggagacaagcggtggaccaagggcgaggacaagaacgctcaggctgcatggaactccttcactgtgctctgaagcaccggcggtagcagcggtggcagccttgcgggatgctggcgggcgtgagagcttggaagcgggatgggcttggcaatggctaggagcttggaagagggcgcaaaggcgacagcagcagccttagccttgcgctatgccaatgcgggtggccgatttacggcgcctggtggactgtggggatgcgtttggttgtgcttgggaagtgccagtgtctggcctgcaag

SEQ ID NO: 752 - DNA, 381 bp, Chlorella vulgaris
acccacgcgtccgcccacgcgtccgggcaagatggcgcggggcccaaagaaacatctgaagagattgaatgccccgaagcactggatgctcgacaagcttgggggcatctttgcccccaagccgagcgcgggcccccacaagacccgggagtgcttgccgctcatcctgctgctgaggaacaggctcaagtacgctctgacgggcaaggaggtgacgagcatcctcatgcagcgcctggtagaggttgaccgcaaggtgcgcactgacaagacctaccccgtgggcttcatggacgtggtcaccatccccaagaccgacgagcacttccgcctggtctacgactgcaagggccgctttgtggtgcaccgcatcagcaagga

SEQ ID NO: 753 - DNA, 172 bp, Chlorella vulgaris
gtgaggtctaagccgcggtgcctgctcaatgggcatacagctgtcattgcgattccccccgcgaggccgctctgccttgaggaatatgcctactaccgggcgctgggcaaggtggtcttgagggatggtgggatgacgctggtggtgggcattgtcaccatcgtgatacctg

SEQ ID NO: 754 - DNA, 398 bp, Chlorella vulgaris
cccacgcgtccgcccacgcgtccggttgtggtgcgggcacttggactgcaaccatgccgaagcagattgaggagatcaaggagtttctcctcaccgccaggcgcaaggatgcccggtctgtgaagatcaagaagaccggcgatgtgaccaagttcaaggtccgctgcttacggtacctgtacaccctctgcgtgaccgactccgacaaggcagacaagctcaagcagtcactgccgcccggcctgcatgtgcaggagatctgaaaagtggagtcgttgtagcagtgatgagtagcgcatgcaacagacggccggaagttgcagcccgcccagctgtccccacctgtgtgtagcagcctgctgggcagggtgtgcagcaaaggccacgggtaggagcag

SEQ ID NO: 755 - DNA, 192 bp, Chlorella vulgaris
ggggtcagccaggtggtcagccaggttctccaccgtgaacaacggctttgccgtggccaccaagttcacccccggcaactgagctggttgtcttgacggacgtttggctgtgctgcttgacaggctggaggtcagcattactatgctggccttgtcttgagaagaaaatccttgtgtaactagctaaccatc

SEQ ID NO: 756 - DNA, 389 bp, Chlorella vulgaris
ctaccgtacggactctacgaatatcatgcagtgcgccatgtctctggcatgtgtccgccccactcgcgtgtttgcggccaagcccgtcaagggtcgtgtcgctcgggggatgactgtgcaggcttacaaggtgaccctgaagacccctagtggcacctccgagatcgagtgcgacgagaacacctatgtcttggatgcggcggagagcgcaggacttgacctgccctactcgtgccgtgcgggtgcctgctcttcctgcgccggcaagattgaggctggcgaagttgaccagagcgacggcaacttccttgaggacgagcagctggagaagggctttgtgctgacctgcgtggcctaccccaagggtgaactgaccatcagcacccacc

SEQ ID NO: 757 - DNA, 279 bp, Chlorella vulgaris
gccagcatgcaccgttccatctctagccttcttaaggttgctgcaccattgtaggacagccgcgccgcgtcaaaggctgcgtgcgtctctttgcacgccagtgttaatgccgcggcggtagaggaggttgccacccccccagctgtgcctaaggtggtgccggcctgtgcatcgttactggcgcctcccgcggcattggcaggggcaatgccctggccctgggaaggggcggatgcaaggtggcagtcaactactcggcctccagcggcgctgctgaag

SEQ ID NO: 758 - DNA, 334 bp, Chlorella vulgaris
cggccaacgcgtcgggaatagatttacccagttgtcctggttgcatgagggcacctgtgctttgggatggagcatagtacacactcttgagctggcgtttgatcatgctgagcacctggttgtgggcgtgctattttccagccctctatgtagcgccactttacttatggcgaggccttccgaggagccatccgacctccatcaggcggcgcatgggtgtcagtatcgtcaccagtgcagtagcttgggtgcccacctggctacccttgtcagctgaggagagacacatgctaccagccatcttggggctacgccctggcaacctgctccaaat

SEQ ID NO: 759 - DNA, 371 bp, Chlorella vulgaris
gtacggtccaggggtcaggacgcgtccacggacgagtgggatcatgatgcatagtagagccgtgctgctgcagcggcctgcgctcaggccggcccctccctgcccacagctcagcagcagcagagccgctagcagactagttgctgtgaggtcagcgggcaatggggctgcagcagtttgtgagttgaaggacggcgtgcgtgtcaaggtggccacaccagtgacggtctttcacgttgggaagttcaagaaggggctcagccttgaagggctggaaggcactgtgctatcagatgaaagccaatacaagggccagaagctgtctgccaacctgccttggaaagtccagttctccgtgccagggccggaag

SEQ ID NO: 760 - DNA, 395 bp, Chlorella vulgaris
acccacgcgtccgggcggcggaaagcaccaagatggcgaaggacaagtctcgctccgccgaggtggtgacccgcgagtataccattaacctgcacaagaggctgcatggcataaccttcaagaagagggctcctaaggccatcaaggacattaagaagtttgcccagcaacacatgaagaccagcgacgtgcgcgtggacgtcaagctgaacaaggccgtgtggagccagggcatcaagaacgtgcccaaccgcctgcgcattgtgatccagcgcaagcgcaacgaggacgacgacgacaaggaggagatgttctccctgatcaccctgaccgacgaccacagcatcaagggcaagggcgtggtggacctggaggcataaacacacacacgcgcc

SEQ ID NO: 761 - DNA, 370 bp, Chlorella vulgaris
cggacgcgtgggcaagacctggcgccgctggcacaggaagatcaacatcaagcagaagcgctatgcggtggtgtccgcactggccgcgtctgctctgcccgcgctggtgatggcgcgcgggcaccgcattgaagaggtggcccaggtgcccctggtcatcgatgacagcgccgagggcgtgaccaagaccaagaaagccgtggaggtcctgaagaagattggtgcctacactgatgtggagaaggccaaggactcgaagaacctgcgccgcggcaagggcaagatgaggaaccggcgctacgtgcagcgcaagggccccctgctggtctatggcaacgactctggtgtggcacgcgccttccgcaacctt

SEQ ID NO: 762 - DNA, 417 bp, Chlorella vulgaris
cccacgcgtccgcccccgtcgacaacaggtccaaggttcacaagatgcagaccctctctgcccgtttcggcgtccgcgcccctgtctcccggggcacccgccaggtgacccgcgcctccgtggagtggtacggccccgaccgcgccaagttcctgggccccttcaccaaccccccttcctacctgaagggtgagttcgctggcgactacggctgggacacctctggcctgtccgccgatcccgagaccttctcccgctacagggaggttgaggtgatccatgcccggtgggccatgcttggcgcccttggctgcgtcgtgcccgagctgctggaccgcaacggcaccgtcaactttggcgagaacgccgtgtggttcaaggccggtgccgccatcttcggcgatgacgggctgaact

SEQ ID NO: 763 - DNA, 140 bp, Chlorella vulgaris
ccacgcgtccgcaagtaatgagagtgccaccatagccgccagaatgcagagcaccttcttgggcaccaaccaggcgctgcttgccaaggtctccagccatgccactcgtggctccaaagtagcaacctcaatgcgccgca

SEQ ID NO: 764 - DNA, 213 bp, Chlorella vulgaris
cctccggacagcggtatgctgcggccccccacatttcataagctagcgcctctacctacgtgtgcacttcattttatatatacaggcgtactatggtagtacctgccttgcctttttctcctgtactacctagctaggtactggctaccagtgtactgcgcaagcctttgaaaagcacgccttgtttttctcaagcggcctccgctgtcacat

SEQ ID NO: 765 - DNA, 335 bp, Chlorella vulgaris
ccacgcgtccgcacacgcgtcagcccacgcgtccgcccacgcgtccgcccacgcgtccggttgataaaggatgcaaggagcgggacgcagcgtaagcgcatcctgaaagcctaccggcaatggcagagggggagcagcaatgggcaggagcagcagtggtgggccggtggcagcagctttgactggtcctcattctcaagtgagcagttctggtggggtggccgccagcagggggcctcccagggggcagccagcgggcgccagcatttcactgctggagcctggtcctgctcttgggaggacctgtttggcgagcaggaggcatggtggcagca

SEQ ID NO: 766 - DNA, 404 bp, Chlorella vulgaris
cgcgtccgtccccgtctcgcaatagttccagggcaatcactatgcaggcaaccatgatgaagaccttcggcgccagcctgcgcaaggctgtgcccacccagggcaagggcacccgccaggtgacccgcgcctccgtggagtggtacggccctgacagggccaagttcctgggccccttctctgagggctccacccccagctacctgaagggcgagttcgccggcgactacggctgggacactgctggtctgtctgccgatccccaaaccttcgctgcctaccgcgaggttgaggtcatccatgcccgctgggccatgcttggcgccctgggctgcctgacccccgagctgctgcagaacgccggcgtggccagcttcggcgacgctgctgtgtggttcaaggct

SEQ ID NO: 767 - DNA, 263 bp, Chlorella vulgaris
cccacacgtccgcatggttggtggagtggacgttgctgatttgatgtacctcacctgaggcgtgtacatgctgcgcacgctgcgcctgtgccgcgtgcgctggctcggtgctctgcagcctgcagattttactggcatcggcgatttaatgtagcaacagtcacttgttgagtgtggtgacgtggggtgtgtaacatgcttccaacacaaaaaaaaaaaaattgaaaaaacaaaaacaaaaaaaaagcaggaaaaaaggtaaa

SEQ ID NO: 768 - DNA, 415 bp, Chlorella vulgaris
gggtccacccacacgtccggaccccaagaagggtggcgtggagtggtacggccccaacaggcccctgttcctgggcccctacagccccgagcccccgagccacctgaagggtgagttcgctggcgactacggctgggacacctccggcctgtccgccgatcccgagaccttctcccgctacagggagattgaggtgatccatgcccgctgggccatgcttggcgcgctgggctgcgtcgtgcccgagctgcttgaccagaccaaccacgtgccctggttcaaggctggcgcccagatctttgcccccgagggcatccagtacctgggtgtggatggcctgatcaatgccaagagcattgtggccaccctcattgtccaggttgtgctcatgtcctttgtggagggctaccgcatc

SEQ ID NO: 769 - DNA, 364 bp, Chlorella vulgaris
ccggggtcacccacacgtccgcacacgcgtccgcccacgcgtccgcccacgcgtccgcccacgcgtctgcggacgcgtgggcggacgcgtgggattcagagaagaattttgtgagcagaggaagaaagatctgatcttgagaactacggagggtctttctgaggagaatgacatcaccaaagatagcggggatgacgaaaacggcgaggctttcaacagtataaaacgtggaggtcgacttctacgaggcataggaaaaggactttcacggcctcaaggcgctactgcacacttatgtacatggggaacagtacaagtgctcacatttggtcgtatcaataatagaacaagcgggggtgggaac

SEQ ID NO: 770 - DNA, 462 bp, Chlorella vulgaris
ccacccacgcgtccgcatttagtcgtgcaacttcaagtagctatcatggcctccctgaccgcctccacaaagcttgtggccgcccgccgggtgtcccttcgcacacaggccaaagctcctcgtcctatgcgcgcaacccgcctagtgtgcagggcagcaagggacgcttctgagaccctggagaaggtcaccaagatcatcgctagccagctcggcactgacgccgataaggtgaagccagagtctgactttgcgagcctgggcgccgactccctcgacgttgtggagattatcatgggcctagaggaggagtttggcattgagatcgaccaggaggatgctgccaatctcaaggacgtgcaggcagtcgctagctatattgtggagaagtagacattcgcagcaggttcgttgagcacaagtcggggaagtggctggcgaggtgtcgaaagcaatgaaaca

SEQ ID NO: 771 - DNA, 334 bp, Chlorella vulgaris
  unsure (1)..(334): unsure at all n locations
ccacgcgtccgtgccggacgctgccaagaagacaaatggccacaagtagtggccaaaggctgggtggtccaggggacggaaaccctggacggagacccctccgggtcttagcctgnaggggagcctggcgtgacttttggtttggctgactctgtcagcccatgccggcgctgctgtcctgcggctttgtggggaagccagccacagcggcccctagcgcagccaccggataggcggcgtgtgtggcgtgcatgagacctccgtgcacgcagccaaccccttgccggttggagccctagccgaggcgtacgtggtggtattcgtttggcaccca

SEQ ID NO: 772 - DNA, 368 bp, Chlorella vulgaris
cacacgtccgcaaacgcgtccgcccacgcgtctgggcaagccgggaatcgagttggccttgagccgacgcgtttgacgcccgcagcagcacctaacacacgcaccaggcaccatgctcatctccaagaagaacaggcgtgaggtgtacaagttcctcttcaatgagggtgtgctgtacgcggagaaggacttcaacctgccggagcaccccgagattgagggggtgtccaacctggtggtcatcaagctgatgcagtccatgaggaacaacgacttggtcagcgagcgctatgcctggcggcattatcactggttcctgaccgacgcgggcatgaagctccagcttgagtacctgcacttgcccaacg

SEQ ID NO: 773 - DNA, 472 bp, Chlorella vulgaris
  unsure (1)..(472): unsure at all n locations
cacccacgcgtccgccaacgcgtccgcggacgcgtggggtggaatcccccgtcgacaacaggtccaaggttcacaagatgcagaccctctctgcccgtttcggcgtccgcgcccctgtctcccggggcacccgccaggtgacccgcgcctccgtggagtggtacggccccgaccgcgccaagttcctgggccccttcaccaaccccccttcctacctgaagggtgagttcgctggcgactacggctgggacacctctggcctgtccgccgatcccgagaccttctcccgctacagggaggttgaggtgatccatgcccggtgggccatgcttggcgcccttgganncctcgtgcccgagctgctggaccgcaacggcaccgtcaactttggcgagaacgccgtgtggttcaaggccggtgccgccatcttcggcgatgacgggctgaactacctgngcaacccctccctcat

SEQ ID NO: 774 - DNA, 416 bp, Chlorella vulgaris
ggaggaggaggcctccctggccgcctgcggcgtgtctgacgacagccagctgtacatcctgatgcgcctgctgggtggtgccaagaagcgcaagaagaagacctacaccaagcccaagaagcagaagcacaagcacaagaagatcaagctcagggtgctcaagttctacaaggtagacgacagcggcaaggtgcagcgcctgcgcaaggtttgcccccagtgcggccccggcatcttcatggccacgcacttcaaccgcgtgtactgcggcaagtgccacctcacctacgtctatgacaaggagggagccaaggcataagcagcttgcgctcactgccctggcgggctgtggtgccgccagggaaactcttcgtctagtagggcgtgccctaaccagcagcctagtggacggagag

SEQ ID NO: 775 - DNA, 332 bp, Chlorella vulgaris
ccacgcgtccgcgaacgcgtgggcggacgcgtgggctttcgcagctggtctgtggcaaggaggtagccgagtgtgtgcgggcggggcactacgcggccggtgtgatcgtgcagcagaacggctgcaccttccctgacaagccgtatggattcagctggtactgaccgaccacgtctgtgggcagcagcagtgtggggtaagtgacagcttgtgctggctacgttgtctaactgagaactgccatgatgtctcgttgttcttttatgctcaatctctagaaaagtgggtgctactgggatatccatcagtgatggtttggctcgctttggagt

SEQ ID NO: 776 - DNA, 365 bp, Chlorella vulgaris
gccacccacgcgtccgcaggggtgaaacatggcacccaagaagaaggttgcggcccctcctgccgcggtcaggaaggccgctcagccggccaagcccgtgaaccccctgtatgagaagaggccgaagaccttcggtatcggtggtgccctgccacccaagaccgaccttcaccgctttgtgaagtggcccaagtatgtgcgcatccagaggcagaagcgtgtgctcaaccagcgtctcaaggtgccccccgcactgaaccgcttcacccgcacgctggacaagaacatggccgagagcctgttcaagctgctgctcaagtaccgccccgaggacaaggcagccaagacgcagcggctgctggctg

SEQ ID NO: 777 - DNA, 338 bp, Chlorella vulgaris
ccacgcgtccgccctgcttgtgtgcgtagcctcagcagacatgcagacctccatgctgaagcctgcttccagccgggtggccttccagcaggccccccgccccgccagcgctgctcgccgcgtggtaacgtgcaatgcccagggcgtgagcgccttcaggaacttcgtggagaaggccgggaacgctgctgcagtgctggctgcgaccgccctggtggccggctccgccaacgccttgacctttgatcagctgcaaagcctgtcgtacaaggaggttaagggcaccggcgttgccaatacttgccctaccattgagggtggctctaccaacccctggg

SEQ ID NO: 778 - DNA, 337 bp, Chlorella vulgaris
ccacacgtccgaacagatctacgccatccgccaggccatcgccaaggcgctagtggccttctaccagagttacgtggatgagcagagcacgaacgagatcaaggatatcctgctgcagtacgacaggacactgctggtcgccgatcttcgccgctctgagcccaacaagtttggctgtcatggtgcccgcgctcgcttccaggagtcttaccgttaaaactctgggcggctgtcgcctgggagctgccaaaatgtccgctgcgtatcccatggccaacggatactgtgggactcagtagtgtgctgatctgactcctctcttaggtacaggttaccg

SEQ ID NO: 779 - DNA, 332 bp, Chlorella vulgaris
ccacgcgtccggaggaatcccccgtcgacaacaggtccaaggttcacaagatgcagaccctctctgcccgtttcggcgtccgcgcccctgtctcccggggcacccgccaggtgacccgcgcctccgtggagtggtacggccccgaccgcgccaagttcctgggccccttcaccaaccccccttcctacctgaagggtgagttcgctggcgactacggctgggacacctctggcctgtccgccgatcccgagaccttctcccgctacagggaggttgaggtgatccatgcccggtgggccatgcttggcgcccttggctgcgtcgtgcccgag

SEQ ID NO: 780 - DNA, 399 bp, Chlorella vulgaris
  unsure (1)..(399): unsure at all n locations
ttccagggccacccacgcgtccgcacgtgcataagacctgccgccatgggtcgtatgcactccaagggcaagggcaagagccgctcggctctgccctacaagcggagcccgccctcttggctcaagatttccagccaggaggtgaacgagctcattggcaagtttgccaanaagggcctgaccccctcccagatcggtgtgctgctgcgtgacagccacggcgtggcccaggtcaagtctgtgaccggcagcaagatcctccgcatccttaagggccagggtttggctcctgagatccccgaggatctgtaccatctgatcaaaaaggccgtgtcaatgcccaagcacttggagnannccncgcaaggacaaggacgccgagttccacctgattcgggt

SEQ ID NO: 781 - DNA, 331 bp, Chlorella vulgaris
  unsure (1)..(331): unsure at all n locations
ccacgcgtccggattangcgttcttggcaccatggctgagaagtcatgcacgatcaggacacgaaagttcatgaccaaccgcctgctgcagcggaggcagtttatccttgatgtgctgcaccctggccgtgccaatgtctccaagactgagctgcgcgagaagctgtccaagatgtacgacgtcaaggactccaactgcgtgtttgtctttggcctgaagacccagtttggtggcggcaagtccacagggtttggcctcatctacgacaacgtccagggggccaagcagttcgagcccaagtacaggctcatcaggaacggtctggcgcag

SEQ ID NO: 782 - DNA, 431 bp, Chlorella vulgaris
cacacgcgtccgcccacgcgtccgcccacgcgtccggaagaacaccatcccacggtgcttgggatagctgcaggggtgtcaagcaggcatccgcaccatgcctttcaagaggtacgtggagattggccgtgtggccatgattaactacggccctgagtacggcaagctggtggtcatctcagacgtggtcgaccagaacagggccctgattgaccggcccgacgagacccgccgtgtggagaacttcaagcgccttgcaatcactgacttcaaggtggagattccccgcctggccaagaagtccgtgctgaagaaggccctggaggaggctgatgtgttcaacaagtttgctgctagcgcctggggccagaagctggccaagcgtgccgccaaggccgaccagactgactttgaccgctacaaggccatgg

SEQ ID NO: 783 - DNA, 289 bp, Chlorella vulgaris
acctgactggccagggccctgaggcctctaagggtgtgtgtgaagcgcctctaccagtggagctctcccaggttgtcaactccttgatgttagtcatcctgcagtaaggggcagaggtggtggagccgcaggtaaacgatggtgatcataagctcatgactggcaaaggttgtatgcgcgcccgtactacgcttaaaactcgggttttgttacgcagcgatgcttgacgactgctactatccctggccttgcatgcatggtcagctgcagagtacttgtgacgtgagtg

SEQ ID NO: 784 - DNA, 324 bp, Chlorella vulgaris
ccggggccacccacgacgtccgcaggctcagcgctagcccagcaagcaccgcccacactgggcatcggttgcgatggtggcacctgcactagtcttgcatggagcactcttgggcccgcagctcttgaggaacaggcctcagcggctggctcgtgggtccatccaggtggtgggcctgctgcgtggcgaccaggtgtccaaggcggccccaagcatcaacactcttgcaggggtgagccaccctaacagccaggcaacagcttctgttggtgccacactaagcatcgctgcgtctctggaccctgctgtccgcactgctcctgc

SEQ ID NO: 785 - DNA, 327 bp, Chlorella vulgaris
ccgggtcgaccactcgtcggcaattgccaagtgcctggacgacgagctggtaaatgcctccagcggcaacagcagcatctacgccatcaacaagaaggacgacattcaccgcttggcaaaggccaaccgctaagcaccttctcacatcatgtcagctgtcgcgcaatgacagcttggcgctggtgaggagcagcggagctgttgtaaatctggcatgcgcggcggtgttaggcggatgcatccggtctgcttagccacccctgcgcttgttgcggcagcagtttcatgcctgctggtatgatccgatgcaaattgctcatactgtcc

SEQ ID NO: 786 - DNA, 313 bp, Chlorella vulgaris
gacatcctgaaaacaagcacgatggccaaaatcaaggcccatgagctgcggaccaagagcaaggccgacttgctggcccagctgaaggaccttaagcaggagctgggtgcgctgcgtgtcgccaaggtcactggcggtgcccccaacaagctctccaagatcaaggtggtgcggaagtccatcgcccgcgtgttgaccgtggtcaaccagaccacccgcagcaagctcagggaggaggttgccggcaagaagtacgtgcccctggacctgcgcgtgaagaagacccgcgccatgcgcagggcgcttaccaagc

SEQ ID NO: 787 - DNA, 340 bp, Chlorella vulgaris
cacacgtccgaacgattcgaactaatgcctatccgaggcttcctcgaatacagaagacatcaacatgtctgacggttgggacagctctatggccgccgatgcccccgccgccgtcgcggctcctgcccccggcaaccttatggccatctacactttcatccatctcatgttcatcaaggagttggattttgacagcctcgcactcggcctgcactatgtcttcagggctattgatctcggccagacgcacctgtgcatcctctcttcagaattttttcatgcccgcttctattattatccttgctgttctgtacgctttgcatcatgtcatgctcattgg

SEQ ID NO: 788 - DNA, 426 bp, Chlorella vulgaris
cccacgcgtccgcacacgcgtccgcggacgcgtgggcggacgcgtgggcgacaccggcagctccaagccgatctttgacgtgtgcatctatggcttcatcgggtcctacattttctcatggcctcgggagtacgcgcacgtataggcggagcatgaagccaagctcatggggcaggtggcacaccactgatggggtggcacttagtcacggagcttgctcgcggtgctgtgctcggcgggtggagcagacctggaggccaactggtggtggactttggtgccctccgtactgacacatgcacagctctgataggctgctcagtgcccttgttggcctggcatggcaatggcttgaaatcacggggcatgactgggagtcgtgccgctgcagcgcgctggggttgctggcgtttcaccgtgtgcatc

SEQ ID NO: 789 - DNA, 409 bp, Chlorella vulgaris
gacgctgggtccaatacagaagcaatcatggcggacgcaggggagcacaaaaagaggacgttccgcaagtacacctaccgtggtgtggacctcgaccagctgctggacctcagcactgacgagctaatcgagctcttccccgctcgtcagcgccgcaggttccagcgcggcctgaagcgcaaggccctggccctgatcaagaagctgcgcaaggccaagaaggaggcgcccgctggcgagaagcccgagccggtgcgcacccacctgcgcaacatgatcatcatccccgagatgatcggctccgtcgtcggcgtgtacaacggcaagaccttcaaccaggttgagatcaagcctgacatggttggcacctacttggctgagtactccatctcctacaagcccgtcaagc

SEQ ID NO: 790 - DNA, 321 bp, Chlorella vulgaris
cccacgcgtccgatttccaatagctgtactgttttccgtgtcgctggggtagggaggcggtcgctatggctgccgcactgggccagagagtgcagctgcaccgctccagcatatttgggaccaagcttgttagcgcaaagccccagcgggtcgcagctccatgcacgttccaagtgcaggccggccgcatcggccccggcaagaaatgggagcattatgagctcacaaagaacttcaagccggtgcggatacccatgcacgtcaagtcaggcgacaccgtgcaggtgattgccggcagtgacaagggggttgtgggcaaga

SEQ ID NO: 791 - DNA, 324 bp, Chlorella vulgaris
ggggccacccacacgtccgcagacgcgtccgttctaagataaacggaacgctggtagctgcagggagcactcaatcggacttgcgcacgagtgacgctctcgctaggacgtctttgccatgagcatggcagctcagacaaatgtcctgtgcacggtaatagcaacggagatgaactgcagattgctccgaatgcactagaccttcggcttattagtcgttggggccccctgccacaccgggcttgttgcaatgctccaggcaaatcagcaggacttgtccactctggacttcgaaaagttttccaaccactactgtgacgacgt

SEQ ID NO: 792 - DNA, 366 bp, Chlorella vulgaris
tgtaaataatacatttttttcttttggctttttttttgttatttataaataacaaaaaaaaagatttgtatattttttattaaaaatatacaacaagcatctttttaacaagtaaaaaagccagcttttttactatgtatattttttataatataaaaaatataaaacacgttcatttttacaatgtaaaaatgaatatgtattttttttatataataaaaaagctaaaaagacagccgttaaatgaatgttttaaatatttttccatgcatcctctattattatccatgctattcttgatgctttgcatcaagaactgcatggaggttttactccattgataaatggaggttttctcaatgcaat

SEQ ID NO: 793 - DNA, 364 bp, Chlorella vulgaris
ttccagggccacccacgcgtccggaagcccgctgccctccgctactcctcgaccatctaaccagcagaaatggtgttcgcaaccaaggcagtcgccagcaaggccgtctcaacctggggcaagggcgccttcccgaagcctcccatcgatgtgctgccccttctgaccgctgtgggcgtgggctgcgttgccgctgtgtggtccatgggccgtaacctggcagtcaaccctgaggtctgctgtacaaaggcctaccgtggtggtgacagcctttggaatgatgaggagattcgctccaagtctgaccagttcaggcccttccccttcattctgcgcatgatggccaactgggtggggggggggg

SEQ ID NO: 794 - DNA, 405 bp, Chlorella vulgaris
gatgatccccgtctcgcaatagttccagggcaatcactatgcaggcaaccatgatgaagaccttcggcgccagcctgcgcaaggctgtgcccacccagggcaagggcacccgccaggtgacccgcgcctccgtggagtggtacggccctgacagggccaagttcctgggccccttctctgagggctccacccccagctacctgaagggcgagttcgccggcgactacggctgggacactgctggtctgtctgccgatccccaaaccttcgctgcctaccgcgaggttgaggtcatccatgcccgctgggccatgcttggcgccctgggctgcctgacccccgagctgctgcagaacgccggcgtggccagcttcggcgacgctgctgtgtggttcacggctggtg

SEQ ID NO: 795 - DNA, 334 bp, Chlorella vulgaris
  unsure (1)..(334): unsure at all n locations
cacccaggcgtccggagccaccaaagccgccagaatgcagaccaccttcgtgggcaccacccaggcgctgcgcgccaaggtctccacccaggccactcgtggctccaaggtancaacctccatgcgccgcaccgtcaagtccaagaacgtgaagaccaccgacaccagccagtggtacggtcccgaccgccccaagttcctgggccccttctccgagggtgctgtgccttcctacctgaacggcgagttcgctggtgactacggctgggacaccgccggcctgtccgccgaccccgagaccttcaagcgctaccgccagattgaggtcatccat

SEQ ID NO: 796 - DNA, 314 bp, Chlorella vulgaris
  unsure (1)..(314): unsure at all n locations
ttccgagtccccccacgcgtccgcaaacgcgtccgccgtgatcgggagtgcccagagcaaaggtactctgtgcatcgtacaagatcggcaacccaccctacctggccaactgaagtagtctatgggttcaagccactattacacgacatgcccctacacgcttatcagtacctctctatgctgaaaaccgtgcttagggtgcgacccaaagtgatgcaggagcttanggagttgtcaagtcaatataacctaactgcatatgaacggcaataaggttagccatagtgctcctgggcctcagtgcctcatcccct

SEQ ID NO: 797 - DNA, 402 bp, Chlorella vulgaris
gccacccacacgtccgcacaaaagtgcttcaaggggttttgatcgcaccagcacggacagccgccctttcagctgttaggccatcaggagccaagatgagcgggccggctataagcattgacttggggactacctacagctgtgtgggtatctggcaacatgaccgtgtggaaatcatcccgaacgatcacgggaaccgcaccataccctcttatgtggccttcacagacactgagcgtctgattggcgatgcagccaagaaccatgtccccatatgacccccatcaacacagtgtttgacgccaagcgtctcattggccgcaagttcaacgacccgtccctgcagcacgacatttcccactggcccttcaaggtcatcgctgggcccggcgacaagcccat

SEQ ID NO: 798 - DNA, 317 bp, Chlorella vulgaris
cacaaccgtgctggcagcagctcccgcacgacctctcacccaccagtcctagcgaggttagcaggggttcaccatgaaccaggcaatctatgtctctctgtctctcattggcctggtggccattgtgggagctggtgttggtgttggtagcggcgtggcactgatcagccagcagccgcaggcgaagactgagccaaccaagcactgagtggttagttgctgtggcatacagcagcggcagcagcagcagcagctagtgctggctagcttggggaagttgcagcttttgcaaaggtgcctggccgtgtgcctacctg

SEQ ID NO: 799 - DNA, 202 bp, Chlorella vulgaris
gccagcactcgcacgacctctcacgcaccattcctagcgaggttagcaagggttcaccatgagccaggcattctatgtctcgctgtctctcattgcccgggtggccattgtccgagctggtgttggtgttgcgtaccccctggcactgatcagccagcagccgcaggcgaggaccgagccagccacgcactgagtggttagt

SEQ ID NO: 800 - DNA, 329 bp, Chlorella vulgaris
  unsure (1)..(329): unsure at all n locations
cacgcctccggaaaggcagtgcatctgctgaggaccgaaacggacaaccatgcagattttctgcaaaacagacaggactcatgtccttgagcttagctccgangccactgtggccgatgtcaaggctgccatcgaggccagccagggcatcccctgcgatgcgcagcgtgtgatgttctctggtcgccagctggaggaggaggcctccctggccgcctgcggcgtgtctgacgacagccagctgtacatcctgatgcgcctgctgggtggtgccaagaagcgcaagaagaagacctacaccaagcccaagaagcagaagcacaagcaca

SEQ ID NO: 801 - DNA, 347 bp, Chlorella vulgaris
ccacgcgtccgcaaacgcgtccgggagcattggttgttgcccgcctgctgtgcttatatttgcctctggctctttcctaggcagccagccgagcctgagggagtgatcatcagccaggcgagatggctctccccggccaacagacgccagacggtatcccgtcctttaaacttgttctggttggagatggtggcacaggcaagaccaccttcgtaaagcgccatctgactggcgagtttgagaagaagtatgaacccacgatcggcgtggaggtgcatcccctggacttcaccaccaaccgcggcaagattaggttctattgctgggacactgcttggggtgggggg

SEQ ID NO: 802 - DNA, 300 bp, Chlorella vulgaris
ctgggcggctggcaacatggcgaccgacattaagttgttcggcaagtggagcttcgatgaggtggaggtgaacgacatctcccttgaggactacattgccgtgaagcccaagtatgcgcgcttcaccccccactctgccggccgtttcaagaagcgccgcttcaggaaggcgcagtgccccattgtcgagaggctgaccaactctctgatgatgcacgggcgcaacaacggcaagaagctgatggcggtacgcatcgtcaagcacacctttgacatcatcaacctgctcaccgaccagaa

SEQ ID NO: 803 - DNA, 318 bp, Chlorella vulgaris
  unsure (1)..(318): unsure at all n locations
ccgcaagaactagtcctccaacatcaagttcccgctcacccgcaagatggccaggccctccgaccccacccacaagtctgtgtttaaggcggtgcgccccaacgttgccatctggtaacctcttactaccccttagtagccgcgtagtccccgtcgcggcagtagcctgngtctggcagcagcactgctgcggcagggggcagcggcgtcagctgcctgngggcggtggtgcgtgtgcggtaaagagaggagccggcgagaggcagaatggcttgccaaccagtttggggcccctctacttgaaggatcacnaggcgg

SEQ ID NO: 804 - DNA, 338 bp, Chlorella vulgaris
cacacgcgtccggacacatcttcaccagaaatctgaacctggtctaagtgcctcccggcaggcttcggaacaactccgacacgccttgtgcgcaaccccaaggccctgcaaggcccttgcactctggtgctagcagacctactgtacaagatcatggtcctcgctgcttttgccccttgcactgccgtccccacttccacttgtcgtcgtgtggtgaggatggggacacagcagccagctgcgccaattagccgaaggtcgtcactatcagcactgctcggccttgctgctttgccgctccttctctctccgggggcggcagaagccaaagatgctcg

SEQ ID NO: 805 - DNA, 424 bp, Chlorella vulgaris
tcccagggacgcgtccgcacggcaagagcctggtgaacgccaaggcgtacctggaggctgtcattgatcacaagcgctgcatcccgttcctgcgctacaatggtggcgtgggccgcaccagccaggctaagaatgagggcaacaagatcggccagggccggtggcccaagaagagctgcgagttcctgctgggcctgctcaaaaatgccgagagcaatgcagaggtgaagggcctggacacggacgccctgtacgtgtctcacatccaggtcaacaaggcgcagaaggggcgccgcaggacctaccgcgcacacggccgcatcaacccctacatgtccagcccctgccacattgagctcatcctgaccgagaaggaccaggcagtcaaggccgagctggaggagaagagcgagcgcaagctgag

SEQ ID NO: 806 - DNA, 338 bp, Chlorella vulgaris
aagcgtccggcgacaagcaccccgaggttgccctcaatgaacatcaagcactgtacagaacagttcctcagggacagtggcctcaactacaccatcttccggccttgcggcttcatgcaggccatcattggtaattacgctgtgcccatcttggaggagagggcggtgtggggcaccgacgatgagacacgcacagcttacatggacactcaggatgtggcccgccttacactagcagcgctcaggagcgacgcgacggtgggcaagacgctagcgctggcagggcccaaggcctggaccaacgacgaggtcatcgcgctgtgtgagaagctgtccgg

SEQ ID NO: 807 - DNA, 344 bp, Chlorella vulgaris
acgcgtccacccacgcgtccgcccacgcgtccgcagctgttttggagacccgtgcataagacctgccgccatgggtcgtatgcactccaagggcaagggcaagagccgctcggctctgccctacaagcggagcccgccctcttggctcaagatttccagccaggaggtgaacgagctcattggcaagtttgccaagaagggcctgaccccctcccagatcggtgtgctgctgcgtgacagccacggcgtggcccaggtcaagtctgtgaccggcagcaagatcctccgcatccttaagggccagggtttggctcctgagattcccgaggatctgtaccatctga

SEQ ID NO: 808 - DNA, 387 bp, Chlorella vulgaris
ggtgatccccgtctcgcaatagttccagggcaatcactatgcaggcaaccatgatgaagaccttcggcgccagcctgcgcaaggctgtgcccacccagggcaagggcacccgccaggtgacccgcgcctccgtggagtggtacggccctgacagggccaagttcctgggccccttctctgagggctccacccccagctacctgaagggcgagttcgccggcgactacggctgggacactgctggtctgtctgccgatccccaaaccttcgctgcctaccgcgaggttgaggtcatccatgcccgctgggccatgcttggcgccctgggctgcctgacccccgagctgctgcagaacgccggcgtggccagcttcggcgacgctgctg

SEQ ID NO: 809 - DNA, 379 bp, Chlorella vulgaris
  unsure (1)..(379): unsure at all n locations
gagctggccaagcgtgagagccggcaaaaggttggcggcgcgggtgccgaggcggggccagcgggcagggctgatggggagggggaggaggccccactggaggcagacatagaggaggacgaggaggagatgatggtggatgatgattactaccagaacgagcatttcgatgatgatgagggctatgatgatggacttgatgatggaggagacgaagggccagtgtactaacagcggcagtgcactagccgtactaggatagctggtagtagtgcgtatgtagactcctcctggtgcagagctagcagctggaatgcaatgtcggtttctgcagcgggtagcangatggggtgtagttcttgtacctctggggttttcc

SEQ ID NO: 810 - DNA, 421 bp, Chlorella vulgaris
gctgttttggagacccgtgcataagacctgccgccatgggtcgtatgcactccaagggcaagggcaagagccgctcggctctgccctacaagcggagcccgccctcttggctcaagatttccagccaggaggtgaacgagctcattggcaagtttgccaagaagggcctgaccccctcccagatcggtgtgctgctgcgtgacagccacggcgtggcccaggtcaagtctgtgaccggcagcaagatcctccgcatccttaagggccagggtttggctcctgagatccccgaggatctgtaccatctgatcaagaaggccgtgtccatgcgcaagcacttggaggccaaccgcaaggacaaggacgccaagttccacctgattctggtggagtcgcgcatccaccgcctggcccgctacta

SEQ ID NO: 811 - DNA, 389 bp, Chlorella vulgaris
gccgaccgacgcatccacgaacgcgtgggcggacgcgtgggcgacaaggagctgttcatcgcccccgagggtgtgttctctggccagtacatctactgcggcaagaaggccaccctgaccattggcaatgtgaagcccgtgggcgacatgcccgagggtaccatcgtgtgcaacgtggaggagaaggctggcgaccgcggctcactggcccgctgctctggcgactacgccatcattgtggcgcacaaccctgatgccggcatcacccgcattaagctgccctcgggcgccaagaaggtgatcagcagcgagtgccgtgggaccgtgggcctggtgtctggcggcggccgtaccgagaagcccatgctcaaggcgggccgcagctacca

SEQ ID NO: 812 - DNA, 390 bp, Chlorella vulgaris
gaacgagaagtgcaacgtcagatatctcagcactagttgttaggggccaggcagatgaagtgacaccgcagtaagattgcagcactgctgggcgaccctgccacaccaaccacagctatagcacactaggactgctaccttcacgcttgtagcctgcttaggcttgccaccccaaggtgttgcctggctgcccaggagggcagaccatggaagtgaaggtgctgttcttcgctcgcagcagggagctggcagggaccccagaggcccagctggacctgccagagggcagcacaacctcggcgttgctagagcaactgctctcacggttcccgcagctgtcagagattcgcggcgcctttgtgttcagcctgaaccaggagtacctggctc

SEQ ID NO: 813 - DNA, 379 bp, Chlorella vulgaris
ataaagatgtcggccgccgctcagaccgtgcctgaggctgtcttgaagaagatgcggagggatgaggagtgggcagcaaagaaggctgctgacgctgctgaggccagcacgaaggccagggctacccgcaaggagatcttcaagcgggcggagcagtatgtgaagcagtaccgtgcacaggacgcggacctgatccgactcaagcggtctgccaagtccaagggcggcttttatgtggagccggaggccaagctgttgtttgtggtgcgcatccgcggtatgaacgacgtggcgcccaagagcaagaagatcctgcagctgctgcgcctgcgccagatccacaacggagtcttcctcaaggtgaacaaggccaccatca

SEQ ID NO: 814 - DNA, 377 bp, Chlorella vulgaris
cccacgcgtccgcccacgcgtccgcccacgcgtccggtaacccatcagcagggattgaaggccaagaacaatggtcaggcacaacaacgtggtgcccaaccagcacttcaggaagaagtggcaggacaaagtcaggacctggttcaaccagcccgctcgcaagctccggaggaggaatgcccgcgccgagaaggccaagaaggtgttcccccgccccaccgcgggcgcgctgaggcccatcgtgcacggccagaccgtcaagtataacatgaagaagcgcgcgggccgcggcttcacgctggaggagctcaaggaggctggcattccctccaagcttgcccccaccattggcattgcagtggaccaccgccgcaaga

SEQ ID NO: 815 - DNA, 375 bp, Chlorella vulgaris
ggcaagatggcgcggggcccaaagaaacatctgaagagattgaatgccccgaagcactggatgctcgacaagcttgggggcatctttgcccccaagccgagcgcgggcccccacaagacccgggagtgcttgccgctcatcctgctgctgaggaacaggctcaagtacgctctgacgggcaaggaggtgacgagcatcctcatgcagcgcctggtagaggttgaccgcaaggtgcgcactgacaagacctaccccgtgggcttcatggacgtggtcaccatccccaagaccgacgagcacttccgcctggtctacgactgcaagggccgctttgtggtgcaccgcatcagcaaggaggaggcggcgtacaagctg

SEQ ID NO: 816 - DNA, 394 bp, Chlorella vulgaris
ggactgggaggatgtgctggtcggtttgctgctcatggacgtcgtgccagcgcccgagaaccacccaggcttccgggccgcgtggcgcgcttgccccaacaccaccgcagtgacccacatggatgtggatgccccggtgctgatgtcggggctgtatgcccaggagctgtccgggctgtgggccaagaagcctgtgcagtgcagctcgggggcgttcctgcctggggattacaatgggtggaagcggtggagggatggcctgaccgatgtggagaggctgtaggcgggtgaatggggtcaacgctgcaactgtcgctcagcggcggtgctgtacgcccttctcggtggtggctgggtgatagtgcaatggaggaggcggctgtttaccaagcga

SEQ ID NO: 817 - DNA, 426 bp, Chlorella vulgaris
gatttctacccaggcccactcccccaggcagaaacaagatggtggctctccagattctcgcagcgactgccaagggcaccgtcaagggtaccgttaagggtaccgcaaagcaggcagcgaagaccgtgaagaaggcggccatcaagaccgcaaagaaggtcgcccccaagaagggtggcgtggagtggtacggccccaacaggcccctgttcctgggcccctacagccccgagcccccgagccacctgaagggtgagttcgctggcgactacggctgggacacctccggcctgtccgccgatcccgagaccttctcccgctacagggagattgaggtgatccatgcccgctgggccatgcttggcgcgctgggctgcgtcgtgcccgagctgcttgaccagaccaaccacgtgccctggttcaagg

SEQ ID NO: 818 - DNA, 345 bp, Chlorella vulgaris
cagcgcgagaagctgtccaagatgtacgacgtcaaggactccaactgcgtgtttgtctttggcctgaagacccagtttggtggcggcaagtccacagggtttggcctcatctacgacaacgtccagggggccaagcagttcgagcccaagtacaggctcatcaggaacggtctggcgcagccggtgcagaagtcgcgcaagcagcagaaggagcgcaagaaccgcaccaagaccatccgcggtgtcaagaagaacgcagtggccggcaagaagtgagcgggcagcagcatgcagccctgagccagcctgcagctctagtaccgcctgtaacaaacctagcaagtg

SEQ ID NO: 819 - DNA, 384 bp, Chlorella vulgaris
acggtctaaattcccgggtccacacaagccttcgaccaagccttcgggaaaaaccccaacttcgaaccctggaaatttcacaaaacaaccacccctggggggtgctttaaccaacccgccaaggttctttcccccggccggtttgtgacctaagtcggcaagagaatttgccagcctctgacacaagtggctgctatatgggagttggggcaagggtggtttggcttttccatgtgtgaccgctctgtgtgagagaagttgggactctgctctagacaccaactgcgacatatactgtgtctatcaccagcatatgtgatgcaaacctaatcagatcctctggttttatgtatggtggggcacggatggcccagtatttctggg

SEQ ID NO: 820 - DNA, 386 bp, Chlorella vulgaris
cccacgcgtccgcggacgcgtgggtctcccgctacagggaggttgaggtgatccatgcccggtgggccatgcttggcgcccttggctgcgtcgtgcccgagctgctggaccgcaacggcaccgtcaactttggcgagaacgccgtgtggttcaaggccggtgccgccatcttcggcgatgacgggctgaactacctgggcaacccctccctcatccacgcacagtccatcgtggccgtgctgctctcccagattgtgctcatgggcctggttgagggctaccgcgtgaacggcggccccgctggcgagggccttgacgccctgtaccccggcgaggcctttgaccccctgggcctggccgacgaccccgacagcttcgctgagctc

SEQ ID NO: 821 - DNA, 396 bp, Chlorella vulgaris
atttaaggagccttaaaaatgtctcaaccaaagtttgattaccatgaaatctttccggagcagaaaaaaaggaatccttgggtaacagttggcgcccttgccacagcaggagtcttagtatccggcctggtagcttttcgacaaggaaatcaaagagtttcccagtctatgatgcgctggcgagtggtggcgcagggcgcaacagtggcgctgatgctgggaagctggatgagcatggctgcggaagacaagaagaatcaagcagcagccccaactgagaggcaatagtgcaatgggcaactcaactgagtgtcgctagacctaggtggggacgggaatgtgtacctgtgtattgccaagttgttatgtatgccacgtgcctttcatgcttaaatt

SEQ ID NO: 822 - DNA, 372 bp, Chlorella vulgaris
gggagagtttgcttgcactcccccgtgcactgaggtgaaggatgatgctgtctctcggagctgccacttctttcggtccagcagctcagcgggccaggcagcactgcaggcatcagatcacgctgccgtcggtacggcagcagcgcctccaaccccagtcacagagttggcagcagcgggcagtgcagacaagagcaacagcacccaacattgttgaggtggatgctgccacgctggaggtggaaatcatgaaccgggaccggcctctcattattgacttctttgcaacttggtgcgggccctgcttgttgctggccaaggagcttgaaacagtggccagcaccctgggcgaccgtgtcaagatactgaaaa

SEQ ID NO: 823 - DNA, 372 bp, Chlorella vulgaris
atcggcatgctggaggagcagctaacagcaggcagctccgcaaaagaggagctggcaagggttcgcgcggagctggccaaagccaggagcgacaatgaggacctgcaagaagccgtgtggagcctggaggacaggctgaagcttaccctgcatgctgcagagcaggaagcctctgacctcaagaggcagctggatgggctcctggaggcccccggcgcccaccgcggccatcagcaccgccaccaccatcagcagtggcaggtgtcgggccctgcctcccagcccaaggtggtcaatgtccacttcaagctgcagcgccagctgcagatgggccagggggtgaccctggtgggcagccacccggccctgggg

SEQ ID NO: 824 - DNA, 352 bp, Chlorella vulgaris
cccacgcgtccgcccacgcgtccgcccacgcgtccgcccacgcgtccggcaggggtgaaacatggcacccaagaagaaggttgcggcccctcctgccgcggtcaggaaggccgctcagccggccaagcccgtgaaccccctgtatgagaagaggccgaagaccttcggtatcggtggtgccctgccacccaagaccgaccttcaccgctttgtgaagtggcccaagtatgtgcgcatccagaggcagaagcgtgtgctcaaccagcgtctcaaggtgccccccgcactgaaccgcttcacccgcacgctggacaagaacatggccgagagcctgttcaagctgctgctcaag

SEQ ID NO: 825 - DNA, 394 bp, Chlorella vulgaris
cggacgcgtgggccgtctcgcaatagttccagggcaatcactatgcaggcaaccatgatgaagaccttcggcgccagcctgcgcaaggctgtgcccacccagggcaagggcacccgccaggtgacccgcgcctccgtggagtggtacggccctgacagggccaagttcctgggccccttctctgagggctccacccccagctacctgaagggcgagttcgccggcgactacggctgggacactgctggtctgtctgccgatccccaaaccttcgctgcctaccgcgaggttgaggtcatccatgcccgctgggccatgcttggcgccctgggctgcctgacccccgagctgctgcagaacgccggcgtggccagcttcggcgacgctgctgtgt

SEQ ID NO: 826 - DNA, 415 bp, Chlorella vulgaris
cccacgcgtccgcagatcttgtgctttcttgttaatagttatcgaggggacaatgcaggccactatgtcgagggtcgctctgggcagcatcgcgggcctgaggcccgctgctactgttcgtcccagggccagcaggacggtggtgagggccatggctgacaagccggcccctggcagcctgcaggttgtagcgcccatcaacggcgacccctacattggcatgctggagacccccgtgacctccgcacccctggttgcctggtacctttccaacctgcccgcctaccgcaccggcgtgtcccccctgctccgcggcgtggagattggccttgcccacggcttcttcctggtcggccccttcatcaagcttggccctctgcgcaacactgacgttgccgacattgtgggctgcatt

SEQ ID NO: 827 - DNA, 409 bp, Chlorella vulgaris
cactgggtccaatacagaagcaatcatggcggacgcaggggagcacaaaaagaggacgttccgcaagtacacctaccgtggtgtggacctcgaccagctgctggacctcagcactgacgagctaatcgagctcttccccgctcgtcagcgccgcaggttccagcgcggcctgaagcgcaaggccctggccctgatcaagaagctgcgcaaggccaagaaggaggcgcccgctggcgagaagcccgagccggtgcgcacccacctgcgcaacatgatcatcatccccgagatgatcggctccgtcgtcggcgtgtacaacggcaagaccttcaaccaggttgagattaagcctgacatggttggcacctacttggctgagtactccatctcctacaagcccgtcaagcac

SEQ ID NO: 828 - DNA, 423 bp, Chlorella vulgaris
cccgggtccacccaagccttcaagacggttccaggttcccgggtgcaccggcggccaattcaaaacacccgctcaagcttcagctccatgtggcaccattaaattgtgacttgccggtgggtttggcaggattgttgcacgcctgtgaggttccacagcttggcgaccgcggaaccccctgttcgttgtcataggctgaagggctggcctttcgtgtgtgagggcagccctgggttactagcgactctgtgtttgtttgtgcagcaaatgatttgttaggtgagcaggacacagagaagagacctgtattggttttgttccggaggggttggccttggccatccttcaaattcagtgcttgttattctgctgcatacgcttgctgctctttgcctgctgtgtctgctttccttgctgtcagtt

SEQ ID NO: 829 - DNA, 378 bp, Chlorella vulgaris
tgactggagagagggataataccacaactcggtgtgccaggaaacacacccttcccttgtttgtcatcacccatctgacggagggtataacatgctgcgcgccgttgccaggaacacggccagactagcgcctcgctatgaggccctggtcgcacagcgcggcatgagcctggctgggatgaagggctatgatgaccgtgagagtgcagaggagaatttgttcatcaaaaaggaggaggagcgcaacctgcggaagctgctggccaagctgaagaagcaggcggaggcgagtgacgcccctgccgcggctgcctccaaggaagctgaggtcaaggcgctgcagcccatcatcgagaagtacaagatcacgaatgatga

SEQ ID NO: 830 - DNA, 335 bp, Chlorella vulgaris
cagacgcgtgggctggaacagctgaagatggagcacaaccagcttacaggcactgttccggccgacctgggctccctggaccgtctcaactggctgcgtgtcgccgacaatcagctgcaaggcactatcccccaggcgctgagcaagacggccccgcacctgtcgcagctgcagatcggcggcaacgacctcagcggcaatctgtacatgctggcagagcaccacctggtgaattttgatggggaggacaatcggcagctgtgcggcatggtccctgtgggcgcccgctttgcccacggcttcaacccctacaacacccgcctgggtctgccctg

SEQ ID NO: 831 - DNA, 404 bp, Chlorella vulgaris
cacacgcgtccggagcgggcaagatggtgcagcgtctcacttacaggcggcgtcacagctacgccaccaagtccaacaagcagcgcctggtgaagacgccaggtggcaagcttgtgtatcagctgctcaagaagccgagctccatcccgacttgcccgatcagcggtcagaggctgaacggcctgcccgctcgccgccccgacaccctctctcgcatcagcaagtcaaagaagaccgtccaccgtgcttatggcggccacctcagccatgctgtcgtgaaggagcgcatcatcagggctttcctggtggaggagcagaagatagtgaagaaggtgctcaagctgcagaaggccaaggagaaggcagctgaaaagaagaagtgagcagcggcagcgcagtgttgt

SEQ ID NO: 832 - DNA, 423 bp, Chlorella vulgaris
gaccgccctggcgggtcgcgtggtggccaccaagcaggccacccgcagcgcagcccgttcctccgtggtggtgagggctgagcgccctctgtgggcccctggtgtggcgccccctgagtacctggacggcactctggcaggtgaccgcggctttgaccccctgggcctgtgtgcggaggcaaagatgcgcacctggtaccagcaggcagagctgcagaacggtcgctgggccatgctgggcgttgctggcatcctcggccaggagatcctcaaccccaaccagttctggtataccgctggcatgcccgagaacgtgcccgatctgtactacggccccaacggcgtgaacctgggaggcctcctggcctgggagttcctgctgttccactatgtggaggtccgtaggtggcaggacatccgcaa

SEQ ID NO: 833 - DNA, 345 bp, Chlorella vulgaris
cgcgtccggagagcctgaccctcttgcctccttttcaccatggcctcggcgttgattgcaaagcccactgtggcccgcgtcttccaaagccgtgcgtccaccgtgcgagccaggagcagcgtgaaggttgcagccgctgagaggcagctgtggctccccggcgcggacgcccctgcccacctgaagggtgacctggccggcgacaggggctttgatcctcttaaccttggaaccgaccccgagcgcctcgcatggtacgcggagggtgagaggatcaacggccgctgggccatggctgccgtggccggtatcctggcccaggacctgctgggcaagggcaactgg

SEQ ID NO: 834 - DNA, 415 bp, Chlorella vulgaris
cccgggtccacccaagccttcgacaaacgcttgggctgacttgtcctcgccgccaggaggcctcttcgagccctgcctggctatcccacttaggacaagatgccgcctaagcgtaggagctctcaggaggagaatgtcaccctgggccctgccaccagggagggtgagctggtgtggggtgtgtgccacatcttcgcgtccttcaatgacacctttgtgcacgtgactgacctgtccggcaaggagaccctggtgcgcgtgactggcggcatgaaggtcaaggccgaccgtgacgagtcctccccctacgctgccatgcttgccgcccaggacgtggccgctcgctgcaaggagctgggtgtgaacgctctgcacatcaagctgcgcgccactggcgggaaccggcacaagaccc

SEQ ID NO: 835 - DNA, 345 bp, Chlorella vulgaris
acagctgccgctggtcaaggactacctgctgtctgtgcagaagaacaacctgcaggctgtgaacgaggctgtgaatgagctgctgatcgaggaggaggactttgcggcgctgcgcgagtccatcaccacctacgacaacttcgaccagctctccctggccggcaggcttgagaagcacgacctcatggagttccgccgcatcgccgcattcatctacaagcgcaacctcaagtggcgcaaggcggtggcgctggccaagcaggacaagctgtacaaggacgccatggagaccgcctcccagagcgaggaccgtgaaatcgcggaggacctgctgcgcttctttgt

SEQ ID NO: 836 - DNA, 389 bp, Chlorella vulgaris
acccacgcgtccgcggaggagcaccttacaatggctccttcagggaagaaggatactaaggccgccaaggcggcaaaggccgtcaagaagtcccaatggaagaagactcgcaagccccgctacagcgtggtcttccacaggcccaggacactcatccgctccagggaccccaagtaccctaggcagagcgctccctccctgcccaagatggacgccttcagcgtgatcaaggcccccttgaccaccgagtcggccatgaagaagattgaggacaacaacaccctggtgttcctggtggacgtgcgcgccaacaagaagcagatcaaggacgccgtggcccgcttgtatgacatccagacgcgcaaaatcaacaccctcatcaggcccga

SEQ ID NO: 837 - DNA, 422 bp, Chlorella vulgaris
cgatccccaaaccttcgctgcctaccgcgaggttgaggtcatccatgcccgctgggccatgcttggcgccctgggctgcctgacccccgagctgctgcagaacgccggcgtggccagcttcggcgacgctgctgtgtggttcaaggctggtgcctccatcttcggcgatgatggcctgaactacctgggcaacccctccctggtccatgcccagtccatcgtggccaccctggccgtgcaggtcatcctcatggctcaggctgaggctttccgtgtgagcggcactgccccctggagcggcgaggagctcgacaccctgtaccccggtgatgcctttgacccccttggcctggctgacgaccccgacacctttgctgagctcaaggtcaaggagatcaagaacggccgcctggctatgttct

SEQ ID NO: 838 - DNA, 414 bp, Chlorella vulgaris
cacacgcgtccgcccacgcgtccgctgagcgccgagttgtgccttgtgggcgcctgcccggggcgggggttgaggaagcgccgtcggtcgctctcccagggagtgaggcccacagaggggcatcaagcgctaccgcttgataagcatgcatccatcagggaacttgaactgtaccccggtgacaaagcgttcggtacgatgtggaaaaccagcggcaaactggacgccttctcaggggcagattctggtattgacgatggctggaacggggtggtgagttcggaccttgacacagcccctggccagtccggctcaaatgtgtgggacagtggtaaccgcgtgagggccctggtcaattcggggggcgacgacggtcgtacccatcaccggaccgtgaccaggagcgtggccaac

SEQ ID NO: 839 - DNA, 394 bp, Chlorella vulgaris
  unsure (1)..(394): unsure at all n locations
agacttcttcagtgacccagagacaaatgggaccttcctcatctgccctgacaaggttatcctgactacgctgtccgcaaacctcaattctttcgcaaatggcagtagcgtcgcacaagtggtgtctggggtacaggctagctccgttaggacggctgcaaggtttctggaggacagcaccctcggcaagacctaccccacgatcacatctttggcgaaggcagggcccattaagacactcagtggcatcacattccaggcccaatatgaccaactgtcaggcgtctatgtgacagtgggaagcgaccctgacattgtagactacagtggctatatccagggaccagtggctatcccagttggcaatgctgtcgtgtacatcacngatacctgc

SEQ ID NO: 840 - DNA, 411 bp, Chlorella vulgaris
acagacgcgtgggcttttcgtagaacagagggtctttcaccatggtgacgcctctcatcaaggtgaagagcgtcaagaagcgcactaagcgcttcaagcgtcaccagagcgaccgtaagatctccgtcaaggagagctggaggcgccccaagggtattgactcgcgggtgcgcaggaagttcaagggatgcggcgtgaatatgcctaacatcggctatggcaccaacaagaagaccaggcacctcctgcccaacggcttctacaagtttgttgtgagcaacgtgaaggacctggagctgctgatgatgcacaaccgcaagtactgcgccgagatcgcgcacaacgtgtccaccctcaagcgcaaggcgattgtggagcgcgccggggagctgaatgtcaagctcaacaatg

SEQ ID NO: 841 - DNA, 338 bp, Chlorella vulgaris
gtaaaccaggacctgctgacggggcggaacctgatgctgggaggctcagtagcaacagccgtgctcctgacagtgttccggagagagatagccccggccttcaagtggctggtgacccaagccaaccagctgaccgacaagacgatcatccgggaggggaacctggagtccctggccacgctagcggcggtgggcctgaccctgttctggagcttcacagagttccaggcgtcgcgggagcgcatgcagagcatggagggcatggaggcggagatggggcggcggctgaaggatgtggcagggcggctggaggcggctgaggcgcggctgggggccgc

SEQ ID NO: 842 - DNA, 235 bp, Chlorella vulgaris
ccagcgcgtccgctcacgcgtacgcggggtcgatatcagacgcttgggtagcacgtgggccatgttcagcatgttgtctaagctcctgttagccgaggacctggttaaactcggcacgggctatggcacttaaggtgacgccgtttgcgttaattgagactcccctttcttaaaacggttatgggcacggactggtgcagcagttcaggtgtgacatgttcaagataaagggctg

SEQ ID NO: 843 - DNA, 367 bp, Chlorella vulgaris
  unsure (1)..(367): unsure at all n locations
accacgcgtccgggccacggtggcgctcaccatgctgctcaggcggttccgcttccggctggcaggctccgccaaggatgtgggcatggccacgggtgccaccatccacaccgccaacggactgaaggtgacggtgcagcgccggcagctgcctgcaccacaggcggagccgcagcaggcggcggcggttgcgagctgatggtaggccgcagccgcgcaaccgtggcagcagcgggcgctgaggttggccccgtgcgaggtaccgcccatttgagctctgggcagccatcccaggctgggttttgtgacagtttgagtgagggaggggctggccatggttgcgagggctccangagggacagagaga

SEQ ID NO: 844 - DNA, 382 bp, Chlorella vulgaris
accgagtcctgccggcggtggagcacatgctgccgctgctcaagcggggaatcggggtgcaccactcaggtctgctgcctatattaaaggaggtggtggagatcctcttccaggaggggctggtcaagtgcctgttcagcacgggtacttttgccatggggctcagcatacccgcccggacggttgtgttcacaggcctttccaattggtcccgccaggggcacaggtggatgggcagcggcgagtacatccagatgagtgggcgcgccgggcgccgcggtaaggacgaccgcggcgtcgcaatcatgatggtggacgaccatatggacgaacccacatgcagggccatggcccagtgcaaggctaagccactgatgtcccc

SEQ ID NO: 845 - DNA, 399 bp, Chlorella vulgaris
aaagccaacccctcttctgtcgacccccttgaaaagtactgcgaggacaagcccgacgcggacaattgcagggtgtttgacaactgaagctacggcttaacggcgcgtaaccagcagagccccctgtatgcggaactgcaattgcggcctggccgtgctccctgtaccatgatcccgctctgcaagtggtggcagcaagagagcttggggcagtcggccttgacaatatggtagcagcagggcagcctaaccctcggcgttgtcactgcgctgcctcgcggttgagagcggcctgtctgatctttcattctgaacgattcagtgcatggcaccggcgtcccttgtctgtgctgtgtgttgtcaagccaaggcgcccagtgcatctgctatcactgcctg

SEQ ID NO: 846 - DNA, 417 bp, Chlorella vulgaris
cggtcgaccacgcgtcgaccacgcgtccgctttgtggagaccaagcgcggcatggactatgagaagccaggcagccaggcagagccaggctccttcctgggctttgaggccgcgttcaagggcactggcgagccccagtaccccggcggcccctttgaccccctcaacatccacaagacccccctgtacgagcgcatgaagtggggcgagatccgcaacgcccgcctggccatgctcgccttcctgggcttcaacctgcagtacctggccaccggcaagagccccatcgacaaccttgttgatcacgttgccaacccctgggccgtgaacttcaccaccaacggtgtgtctgtgcccttcttctgagctgttgcctgtagccctccggcagtgccctggagcgtctcaacagcagca

SEQ ID NO: 847 - DNA, 326 bp, Chlorella vulgaris
gacccatgcgtccacccacgtgtccgaaaaaaaaaaaaaaaataatataaataataaaaaaaaaaaaaaaaaaaaaaaattaaagaaataaaataataaaaaaataaaaaaaaaataagggggaaattaaaaaaagatgggggggttgcttcagaggtttttggtgttttgttagcatttcttgaggtttaataggattttcatatagttgggcgttgttttataacgttggttctggtttaatggtgtggtcatggaaattatccgggttttcgtaaatttcctttttttaaggggagttgtgtttttgtaggtggggtttgtta

SEQ ID NO: 848 - DNA, 365 bp, Chlorella vulgaris
aaccggcccttacatcaagatgggtcgtgtcatccgcgcccagcgtaagggtcgtgggtcggtgttcaagtcccacaacacccacaggaagggcgcagccaagctgcgcgtcctggacgccgcagagcgcaatggctacatcaagggcgtgattagcgacatcatccacgaccccggccgtggcgcacccctggccaaggtgactttccgccacacccacaagtacaagcacgacaaggagctgttcatcgcccccgagggtgtgttctctggccagtacatctactgcggcaagaaggccaccctgaccattggcaatgtgaagcccgtgggcgacatgcccgaggggtacatcgtgtgcaacg

SEQ ID NO: 849 - DNA, 376 bp, Chlorella vulgaris
aattggccggccgacccacgcatccagcggcttcttgaggcgtataacgtcaagatgccgtcccagaaggcttttgccatcaagaagaagctggccaagaaggccaagcagaacaggcctatcccgccctggatccgcttcaggaccaataacaagatcaggtggaacgccaagcgcaggcactggcggaggaccaagctgggcatctaaacggccagcattctcgctttcttgtcggcattgcagcttgggagtgcagacgcctggcctggccgacctttattgttgcggcagcgcagcagcctggcggaaggcagtagcaaccgcagctggggggcagcctcctggcccatgcagtaatgtaacaacctacgct

SEQ ID NO: 850 - DNA, 411 bp, Chlorella vulgaris
  unsure (1)..(411): unsure at all n locations
tcagcagacgcatgggcggacgcgtgggcggctacaagatgtctggcgtgggccgtgacaagggccccttaccccctggagcactacacacaaggttcaaggcctgttgttacaaggcccctgcaacccaaacaagccctggatgttagtcccaaggcaaccaaccagtgtngacatttacaccacctacccgtatcctctgccttcagcaacagtangagttctgcgtcatctggggatccttgaacagtgctttatacttttgacaggcctccaatggcacccgtttttccgaacgaattgtatctgtggcacacggaccttgcctgtagcagctggttgctgtgtcaggtctgtcgtactaccaggggggttggccccgttttgttgttgcttctgctcataatcttg

SEQ ID NO: 851 - DNA, 396 bp, Chlorella vulgaris
tccggctcgaccacgcgtccagcagatcgtctgaggaaccgtgcatcatgacttcgaagttccctgcacacgcaatcacaagggagcccgcgcggacgactatagtgaacagccttaatgagatgtggccctttgttgcgggcttctctctaactggctatatcttcacaaaggttgccctgtcagtgacagatgaggatgtgaagaactcaaagtttgccaaccccaagggccacagccactgagccctgaactggcacgcagctgggaagcagcgagcggcagtcctcggcggacagaccggtgtaggtgtaggcggtaatgcaacgctgcgcacggctcctccgttgcagcatactgcatcagccgggatgtgagcggcagtgctgtttttgg

SEQ ID NO: 852 - DNA, 378 bp, Chlorella vulgaris
accacccatcaacgcgtccggtctcgcaatagttccagggcaatccttatgcagggaaccatgatgaaaaccttcggcgccaccctgcgcaaggctgtgcccacccagggcaagggcacccgccaggtgacccgcgcctccgtggagtggtacggccctgacagggccaagttcctgagccccttctctgagggctccacccccagctacctgaagggcgagttcgccggcgactaccgctgggacactgctggtctgtctgccgatccccaaaccttcgctgcctaccgctaggttgaggtcatccatgcccgctgggccatgcttggcgccctgggctgcctgacccccgagctgctgcaaaacgccggcgtggcc

SEQ ID NO: 853 - DNA, 415 bp, Chlorella vulgaris
  unsure (1)..(415): unsure at all n locations
acggacgcgtgggcttgaattcggttgtagcttgcagctgctatgatgggcgccttcatgtgtcaaactcccttcactcctccactggccgggtgcccacaccgcgcaggccagaggcgccacagtcggacccagctgactgtgaaagcagcaagcagcgctgctgtgccgatgaaaaacaaagggtcttggactgatgagcttcttatgaagctagtcaacacggcagtgaacactccccccatctatggcgctatgaagctgatggccaggcagatcatgattgacaccgcggagaagaagggagttaactggaagcagaacgtcagggacctggagcgctcagaggtgtnacagattaaggaggagctggaggacaaggctgccacctacccgccctactacctgcagccct

SEQ ID NO: 854 - DNA, 399 bp, Chlorella vulgaris
ccacgcatccacccacgcgtccggtagaacagagggtctttcaccatggtgacgcctctcatcaaggtgaagagcgtcaagaagcgcactaagcgcttcaagcgtcaccagagcgaccgtaagatctccgtcaaggagagctggaggcgccccaagggtattgactcgcgggtgcgcaggaagttcaagggatgcggcgtgaatatgcctaacatcggctatggcaccaacaagaagaccaggcacctcctgcccaacggcttctacaagtttgttgtgagcaacgtgaaggacctggagctgctgatgatgcacaaccgcaagtactgcgccgagatcgcgcacaacgtgtccaccctcaagcgcaaggcgattgtggaccgcgcggggagctgaatg

SEQ ID NO: 855 - DNA, 424 bp, Chlorella vulgaris
ttcacggggccaccgacgcgtccgaagacgcatgggcaatacagaagcaatcatggcggacgcaggggagcacaaaaagaggacgttccgcaagtacacctaccgtggtgtggacctcgaccagctgctggacctcagcactgacgagctaatcgagctcttccccgctcgtcagcgccgcaggttccagcgcggcctgaagcgcaaggccctggccctgatcaagaagctgcgcaaggccaagaaggaggcgcccgctggcgagaagcccgagccggtgcgcacccacctgcgcaacatgatcatcatccccgagatgatcggctccgtcgtcggcgtgtacaacggcaagaccttcaaccaggttgagatcaagcctgacatggttggcacctacttggctgagtactccatctcgtacaag

SEQ ID NO: 856 - DNA, 298 bp, Chlorella vulgaris
acccacgcgtccgcggcgcgtgggcggacgcgtgggggccaggccacatcatcctctgggcacgcatcgtgaatggagtatgagagacaccccggcagcagaatgacctgagtagtggtgggacggcggcagcctagctggacttccaacccctaggctctgtaagatgactggcgaacctcgcatgggcggccggactggtgggaggatagcgtggcggagaggccactttgccgctggtggcactgccataccgcactcattggtgccctgcgcaggccgcctgtgccaggccttg

SEQ ID NO: 857 - DNA, 408 bp, Chlorella vulgaris
accacgcgtccgggcaagatggcgcggggcccaaagaaacatctgaagagattgaatgccccgaagcactggatgctcgacaagcttgggggcatctttgcccccaagccgagcgcgggcccccacaagacccgggagtgcttgccgctcatcctgctgctgaggaacaggctcaagtacgctctgacgggcaaggaggtgacgagcatcctcatgcagcgcctggtagaggttgaccgcaaggtgcgcactgacaagacctaccccgtgggcttcatggacgtggtcaccatccccaggaccgacgagcacttccgcctggtctacgactgcaagggccgctttgtggtgcaccgcatcagcacggacgaggcggcgtacaagctgtgcaacgtccgccgcgtgcag

SEQ ID NO: 858 - DNA, 331 bp, Chlorella vulgaris
cccacgagtccgaccacgcgtccgccaacacgtccgcccacgcgtccgcccacgcgtccggccgaccaccttgccgacccctgggcaaccaccgtgctctccaacgagcatgcccgcctgcgctgagcgctgcgcctgctgcttgccggcttgtaggctgaactgctactttgtgtgccttggaaggggcccaaactccctatgtgtcgttggcctaaaactaggcatgctgacatttgagcatggccgctgttgcgctcccctgccatcgaaagtctgtcgttgcaggtttttgctacctagcttgtcggtgtacgctttgcctcgcgct

SEQ ID NO: 859 - DNA, 419 bp, Chlorella vulgaris
accacgcgtccgcttacaggtagtgagagtgccaccaaagccgccagaatgcagaccaccttcgtgggcaccacccaggcgctgcgcgccaaggtctccacccaggccactcgtggctccaaggtagcaacctccatgcgccgcaccgtcaagtccaagaacgtgaagaccaccgacaccagccagtggtacggtcccgaccgccccaagttcctgggccccttctccgagggtgctgtgccttcctacctgaacggcgagttcgctggtgactacggctgggacaccgccggcctgtccgccgaccccgagaccttcaagcgctaccgccagattgaggtcatccatgcccgctgggccatgcttggcgccctgggctgcatcttgcccgaggtcctgcaaaggtacagcggcatcga

SEQ ID NO: 860 - DNA, 375 bp, Chlorella vulgaris
gttagtggaagggggagagccgcaaaaatggcgtcggacaagaaggctcagaaccccatgcgcgagatccgcgtcgcaaagctcatcctcaactgctgcaccggcgagtctggtgatcgcctgcagaaggcggcaaaggtgcttgagcagctgaccgggcagcagcctgtgtttggcaaggcccgctacaccgttcgccagtgggccatccgccgtaacgagaagatctcctgccacgtcaccgtgcgcggggagaaggccgtgcagctgctggaggccgggctcaaggttcgggagtacgagctgcttcgtcgcaacttctctgacagcggcaactttggctttggcatcaatgagcacattggactgggcatc

SEQ ID NO: 861 - DNA, 318 bp, Chlorella vulgaris
ggcccaccccacgagttagctgttcttagtcaagcagtgcctatctaccctcacaccgcagcctcacaagcagccatggccggcaaggaggttatccgtgcggcccagatgtttacaaagacgggccaggccagcaaggtcagcgtggtgaaggagattgttattggcacggtcctgggcactgcgctgggcatgtggtggcagacgtggcattggtcagagaacaagaagtgggaagatcattacaaggcgcttgcggcccagaagtgaaggacttgttggctgctggttagagcccctgtctctgcaaggtctgct

SEQ ID NO: 862 - DNA, 324 bp, Chlorella vulgaris
ggtgcaccccagcatcggcgccctgctttcgtggcgctactgccagctcctgacggcgctcccaaaccgcggcaccgaggcggctgcctggcacaagatggccggctgcttgtgggaggaggcccccatcgggcgcaagaacgcgcctgacacggtgtttggcggtctggagtacctcaagggcaagggagacccggggatgggagtggtggtggatctcatggctcgtagagcgctgccgcggcagctgtgagcagccttccttggaggagagggcgctgactgactgttatgaagacaaccaaaagcaccactggggtgcga

SEQ ID NO: 863 - DNA, 364 bp, Chlorella vulgaris
ctccgaggccactgtggccgatgtcaaggctgccatcgaggccagccagggcatcccctgcgatgcgcagcgtgtgatgttctctggtcgccagctggaggaggaggcctccctggccgcctgcggcgtgtctgacgacagccagctgtacatcctgatgcgcctgctgggtggtgccaagaagcgcaagaagaagacctacaccaagcccaagaagcagaagcacaagcacaagaagatcaagctcagggtgctcaagttctacaaggtagacgacagcggcaaggtgcagcgcctgcgcaaggtttgcccccagtgcggccccggcatcttcatggccacgcacttcaaccgcgtgtactgc

SEQ ID NO: 864 - DNA, 369 bp, Chlorella vulgaris
acccaagcgtccggccgggaatcgagttggccttgagccgacgcgtttgacgcccgcagcagcacctaacacacgcaccaggcaccatgctcatctccaagaagaacaggcgtgaggtgtacaagttcctcttcaatgagggtgtgctgtacgcggagaaggacttcaacctgccggagcaccccgagattgagggggtgtccaacctggaggtcatcaagctgatgcagtccatgaagagcaaggacttggtcagcgagcgctatgcctggcgccactactactggttcctgacggacgcgggcatcgagcacctgcgtgagtacctgaacttgcccagcgagattgtgcccgccacactgaagaaat

SEQ ID NO: 865 - DNA, 399 bp, Chlorella vulgaris
cacagccagtcgactcggagcagcatggcagcgatggcttccctgaccgccaggaccgccttcgtgggcaagacccactcccagccccgccaggcggcgaggaggagcagcgtggttgtggctgccagcaggcccatctggtaccctggcaacgatgaggtggtgcccccttacctcgacggcgagctgccaggcgactacggctttgaccccctgcgcctggctgacgaccccgagaaccgcaggtggttggtccactccgagatcttccacggccgcgtggccatgaccggcgttgcgggcatcctgtacacctcgctggccattgcctccggccaggacatctccgagtggtttgatgccggcaaggtgtacgctgagacccaccccgatgtgccc

SEQ ID NO: 866 - DNA, 421 bp, Chlorella vulgaris
accgaattctaccttggcaagaagattgccttcatctacaaggccaagaccgagaagaagggcagcctttatcgcgtgatctggggcaaggtcacccgtgcccacggcagcaccggcactgtccgcgccaagttcaggaagaacctgccacccagctccctgggcgccaaggttcgcgtcatgctctaccccagccgtatctagtggactgaagcggcgccgccagctggcgggcagcatgcacggcagcagtggcgatgcgcggcagctgtgccggagcaaactggagtgagggacgggccccgcgcactggcaggggcaggtgcttcggtgggctgtagcaagctcagcacagcacagcatggcgcagcagccgtgctatgtgtggtgactgtgcatggagcggggacaggagctgggg

SEQ ID NO: 867 - DNA, 405 bp, Chlorella vulgaris
cggacgcgtgggctgcaaagtgctctttactgctgcctaccatgcgagcctccctgctactggccgccgctgcggcgttactatgtcagacggcctccacgcaacacatgatgatgccaggccatcgaggctaacttgatgacaaggcatgggaggtgcaatcaagccttctcagagtatggacgacccttgctacacggacccttctgttgagggctgccgctccttccggaggggccacatggatattgtggctgaccgcgacagcctctgtgcggccatggatttcatggttggctgcaccctgtcgcacgagtgcacgaatggcaccaccaatgccaactctacgtactgcaagccttggagcctggtgggcgacctgtgccttgacatgcccggcatgga

SEQ ID NO: 868 - DNA, 251 bp, Chlorella vulgaris
ccacgcgtccaagcaaggcgtcgggcccgggaatcgatttggacttgagcggacgccttttacgcctccaagagcacgtaacacacgcactaggcagcatgctcatctccaggaagaacaggcgtgaggtgtacaagttcctcttcaatgacggtgtgctgtacgccgataatgacttcatcctgccggagcagcccgagattgatggggtgtccaacctgctatgtcatcaatgctgatgacattccatg

SEQ ID NO: 869 - DNA, 395 bp, Chlorella vulgaris
gaccctcaagacttactatcagctgcatttcagccagtagaacagagcagtcatggcgtcccagctgcttgccacccgccctggcctccgtgtggcccctgccaccagcactcgcctgagccgccgctccgttgttgtgaaggccgccaacctgagcaccatcgagaagcagtacaaggagttcagggtcccccagatccctgtggccaccgtgtttggcattgccggctggctggtgcccgctgctagccccgcccctgccttcggcggtcgctctctcctgagtgtgttcaccgagagcatcggccaggagctttcccacttccccaccggccctgctctggactcccagttctggctctacctggccattttccatgttggcctattcgcca

SEQ ID NO: 870 - DNA, 336 bp, Chlorella vulgaris
acggacgcgtgggctggtttctacccaggcccactcccccaggcagaaacaagatggtggctctccagattctcgcagcgactgccaagggcaccgtcaagggtaccgttaagggtaccgcaaagcaggcagcgaagaccgtgaagaaggcggccatcaagaccgcaaagaaggtcgcccccaagaagggtggcgtggagtggtacggccccaacaggcccctgttcctgggcccctacagccccgagcccccgagccacctgaagggtgagttcgctggcgactacggctgggacacctccggcctgtccgccgatcccgagaccttctcccgct

SEQ ID NO: 871 - DNA, 356 bp, Chlorella vulgaris
aacaggtccaaggttcacaagatgcagaccctctctgcccgtttcggcgtccgcgcccctgtctcccggggcacccgccaggtgacccgcgcctccgtggagtggtacggccccgaccgcgccaagttcctgggccccttcaccaaccccccttcctacctgaagggtgagttcgctggcgactacggctgggacacctctggcctgtccgccgatcccgagaccttctcccgctacagggaggttgaggtgatccatgcccggtgggccatgcttggcgcccttggctgcgtcgtgcccgagctgctggaccgcaacggcaccgtcaactttggcgagaacgccgtgtggttcaa

SEQ ID NO: 872 - DNA, 349 bp, Chlorella vulgaris
ccgcatgcttgattgccacatgtgtcgtcgttggcacccctcatggtatcgagacactaagaagcacgcagaacttcatgccagatgacgtggaggcgtatgccggcctactgcacaccatcagagccttggagaaagcgaaggtcacagagcgccttgcagaagcaaagcagctgcagacctccctactaacagaactggagcacaagcaaggttgccggcagaagttatgtggtgccctcaaagtcacgcaggaaaagctgactgactaccaggaaggattcttcaccaacctcatcatgaatgacaaagagaagtccaggaagctggaaaagcacagcaagctgct

SEQ ID NO: 873 - DNA, 372 bp, Chlorella vulgaris
gtcatggatcttgctgctgtgcctgcttcaccgctacggtaccgggtggtagagattgggagtggtactggctggggtggtcgccgatataatatacaggtctatacggtcaagacctgcaatcaataacagtaccagccctcgatccatacgtgggtgcaatcatgcagaccgcagttcatccacgattcctctgcctgccaatccggcaaccacgacacgggttcagcatcaagttcagccagcaagggcgtgtccgccaccagtgctccgcaacgtctggccccgagttttgtggcaggcagttcacacttctatcaaccagctaggatgccacagctcatttggcaaccatactagcagctgacatgc

SEQ ID NO: 874 - DNA, 420 bp, Chlorella vulgaris
ggaaggcagtgcatctgctgaggaccgaaacggacaaccatgcagattttctgcaaaacagacaggactcatgtccttgagcttagctccgaggccactgtggccgatgtcaaggctgccatcgaggccagccagggcatcccctgcgatgcgcagcgtgtgatgttctctggtcgccagctggaggaggaggcctccctggccgcctgcggcgtgtctgacgacagccagctgtacatcctgatgcgcctgctgggtggtgccaagaagcgcaagaagaagacctacaccaagcccaagaagcagaagcacaagcacaagaagatcaagctcagggtgctcaagttctacaaggtagacgacagcggcaaggtgcagcgcctgcgcaaggtttgcccccagtgcggccccggcatcttc

SEQ ID NO: 875 - DNA, 259 bp, Chlorella vulgaris
acggacgcgtgggcggacgcgtgggcggacgcgtgggcggacgcgtgggaaaaaaaaaaaaacaaagataaatgaagcaattgaataacaattcgagcccatgctagcaggaggactcttaatactctagactaatatactaatgacgtggaaatcaaagagtttcccgagtatatgctacaatgattaattgtgacttcagtgtaaaccctcgctctgatactgagaaactgaatctgcatttcagcgcactagcatt

SEQ ID NO: 876 - DNA, 192 bp, Chlorella vulgaris
accacgcgtccgaaaaaaaaaaaaaaaaaaaaaatatgaaaaaaaaaaaaaaaagtaaatatgtcaaaaaaaaaaaaaaatggaggaggcaatctgggttcgacacatcggtacgcgtacagtgcgccttccgtaccagtctaacgtttccctattgttgtattcaatggccttgtttttcccacctagggc

SEQ ID NO: 877 - DNA, 248 bp, Chlorella vulgaris
cggacgcgtgggttgaggcatgcccaaacccatgagccgctccacaaacttgtgtaccctgttgtagcctgtccgcgagaggccctggaactgcaattttcctggctttgattttgctgcccctttgctttgccagttcattgggctggaatagtccacgctctattcagtttattggaaatgaaggacgccttgcagttgtggtgtacgaggtgcaaatcaaagcaggtgtaacaccagcagcgcgc

SEQ ID NO: 878 - DNA, 364 bp, Chlorella vulgaris
cctgggtcagctgaggagcaggcatggtgctcaagacccagacttgccgcttcagcggcctcaggatttatcctggcaagggaatcctgttcatccgtgttgatggccagcaattcctcttcctgaagcagaagtgcaagagcatgttcaaccagaggaagaggcccgcaaagattgcttggaccaccctctacaggaagcagcaccgcaaggaccaggaggcgcaggttgcgcgcaagaagcgcaggtctgccaccaaggtgcagacgcgctcaattgtgggcgtgtccctggaggtgattcagaagaagaaggcagagaagcccgagcagcgcaaggcctcacgcgaggcggccctccgtga

SEQ ID NO: 879 - DNA, 381 bp, Chlorella vulgaris
ttgaattggtagaatccaaggaggagcgagaaaagtgagctctggagtggggacggattgaggagttggccagtaaaccaggtgccgttcagtgaggtggcaggatggtggccagctctggcccctccctctcattccctctcacttttgcaagctccgcaatagcagcatgcacgggcgagatcaccaccctcccattagacacagccaaagttaggctgcagctgcagggcaagagtgcggcccccaagtacaaggggctactgggtaccatcggcactgtcgccaaggaggagggcgttggctcactgtggaagggccttgggccaggcctccatagacagatcctgtttggtggcctgaggatcggcatgtatgaac

SEQ ID NO: 880 - DNA, 256 bp, Chlorella vulgaris
cgcgtccgcccacgcgtccgctaaagcggtcggccgagaaaagtgagctctggaatggggaccgattgaggagttggccattggaccaagtgccgttcagtgaggtgtgaagatggaggcgaactctggggcctccctctcagtctctctcacttttgcaatctccgcagtagcagcatgcacgggcgagatgtatatcctcgcattatacacagccatagttaggctgcaactgcagggcaatagtgcggccccc

SEQ ID NO: 881 - DNA, 382 bp, Chlorella vulgaris
gtgctgaaccctggggccttggggttccctgctgcgcagccctgcctgcctgcttgaagcctttcccgctcggcaattaccgctgtgcgggctatgctgtgtggcgctgtgttgaggggtgggctgtgatggcggcgggagggcacgctagcagcgtggcaggggtcctagggacctggctgggcgcggttggcatgtgcttggaagggtggggtgcgctgctgtggcggctgttttgccaactcttctcgggggcccacgggcaaaatttgcggctgggcagttgggctgctgcaggggcgacccccgccctggaggtgactgtgtctccctagtataaggcttgttgcattgcaatgcatggactgcagtttctggtggt

SEQ ID NO: 882 - DNA, 357 bp, Chlorella vulgaris
cccacgcgtccggatggagcgtgcgcgtagctgtggtgtctggcgtgccgccggagacgttgtatgctggggagaaggacgccaagcggtggcagcacccgcaccgccgcatgcagttccttctcatgaagccagccaagcacgagtttgggctgatcggcggcgcctgggaccccgccgacggcggccacccccaaaaggacccccgggcgctgctcaacaccgcgcttcgcacattcaaggcggccacggggcgggacctggccccctgcactcactgggcgcccttagtggaggtctcctacctgcgccccggcggcagcggcagccgcggtagcgacaccccagcccccgaac

SEQ ID NO: 883 - DNA, 322 bp, Chlorella vulgaris
cttcaagtagctatcatggcctccctgaccgcctccacaaagcttgtggccgcccgccgggtgtcccttcgcacacaggccaaagctcctcgtcctatgcgcgcaacccgcctagtgtgcagggcagcaagggacgcttctgagaccctggagaaggtcaccaagatcatcgctagccagctcggcactgacgccgataaggtgaagccagagtctgactttgcgagcctgggcgccgactccctcgacgttgtggagattatcatgggcctagaggaggagtttggcattgagatcgaccaggaggatgctgccaagctca

SEQ ID NO: 884 - DNA, 404 bp, Chlorella vulgaris
gcgagctgtcagtcggactttcttctctcttgcatcctcgtctgagcctcaccctgcactgcgccgtctgtttgtctagttgatgcgcccccgcgtgagggggagtgcggcctagggggcgaccggcaagcctggggctggcactgcgaggggttggccagaagactacttccagttcgttttggggtgatgagactttcaaattccttatgtgtcgcgcccccgtctgtacacctgcctgcccgggggcagcggccccgcaagccttggcagggtttgtttgccaactcgcttcattgtgtgtatgtagctcggcttcgactttggttgttctgtacattaggcgcaccgctcccctgcatatcactttgcgaacttcgtgtgctatgcgccgctgtgcgctc

SEQ ID NO: 885 - DNA, 418 bp, Chlorella vulgaris
gcgtgaggatgccacccgcattggctccgccggtgtggtgcgccgccaggctgttgatgtgtcgccgctgcggcgcgtgaaccaggccatctggttgctcaccaccggcgcgcgtgagtccgccttccgtaacatcaagaccattgccgagtgcctggccgacgagctggtgaatgccgccaagggcagcagcaacagctacgccatcaagaagaaggacgagatcgagcgcgtggcaaaggccaaccgctaagcgccttctcacatcatgtctgctggcgcgcaatgagagcttggagctggggaggagcagcggcgctgttgtagatctggcgtgggcgggggtgttggagggatgcaggcgggcggcgttgccgcgcctgcgcttgttgctgctgccgtttcatgcctgctggta

SEQ ID NO: 886 - DNA, 344 bp, Chlorella vulgaris
agccagtcgactcggagcaccatggcagcgatggcttccctgaccgccaggaccgccttcgtgggcaagacccactcccagccccgccaggcggcgaggaggagcagcgtggttgtggctgccagcaggcccatctggtaccctggcaacgatgaggtggtgcccccttacctcgacggcgagctgccaggcgactacggctttgaccccctgcgcctggctgacgaccccgagaaccgcaggtggttggtccactccgagatcttccacggccgcgtggccatgaccggcgttgcgggcatcctgtacacctcgctggccaatgcctccggccaggacatccc

SEQ ID NO: 887 - DNA, 98 bp, Chlorella vulgaris
accacgcgtccgcccacgcgtccgcccacgcgtccgcccacgcgtccgcccatgcgtccgaaaaaaatataaaaaaaaagaaaaaaagaaactgaaaa

SEQ ID NO: 888 - DNA, 422 bp, Chlorella vulgaris
gctggcattccctccaagcttgcccccaccattggcattgcagtggaccaccgccgcaagaacaggtcccttgaggggcttcaggagaatgtgaaccgcctgaaggcctacaaggccaacctggtggtgttcccgcgccgcgccggcaagcccaaggccggcgatgccagcgcggaggagctcaaggcggtcgcgcagctcagcggcccggtgctgcccgtcacacgcgctgcgcccgctctggagaaggttgccatcaccgccgagatgaaggccgagaaggcataccacaccctgcgcacggagcgcatgaatgcccgcctggttggcgtgcgcgccaagcgcgccgcagaggaggcagcagcagccaaggacgccgcataagcggggggcggccgtggcatttggagcacccgtggaac

SEQ ID NO: 889 - DNA, 414 bp, Chlorella vulgaris
tcttcatccaggcacttgtgaccggcaagtctcccctggagaacctggccgaccacctggctgaccccgcctccaacaacggcttctccatcctgaccgccaccaagttcaccccctgaattcagccctgaattttgagggaaatcccctgactgctgctagttcctcgttgttctagctcttggttggttgccggtgtgtcgctgttgtgtgaaggggagaggcgtgaccccttggttgtctactggcagcagcagcagcacccagcagctggacggtcgtattgagatgtgtgtgacgcggcaaaattcgtaacgcacgaggaatcgagaagagcacctttaattccccctgctggttggagttttgctgcatttgcactgtacactggcgggctgtatacgcggtggccca

SEQ ID NO: 890 - DNA, 354 bp, Chlorella vulgaris
cccacgcgtccggattttaagccatcctgaaaacaagcacgatggccaaaatcaaggcccatgagctgcggaccaagagcaaggccgacttgctggcccagctgaaggaccttaagcaggagctgggtgcgctgcgtgtcgccaaggtcactggcggtgcccccaacaagctctccaagatcaaggtggtgcggaagtccatcgcccgcgtgttgaccgtggtcaaccagaccacccgcagcaagctcagggaggaggttgccggcaagaagtacgtgcccctggacctgcgcgtgaagaagacccgcgccatgcgcagggcgcttaccaagcatgaaaggaccgtccggactg

SEQ ID NO: 891 - DNA, 251 bp, Chlorella vulgaris
cccacgcgtccgcccacgcgtccgaaaaaaaaaaaaaaaaaaaaaaaaaaaaaaaaaaaaaaaaaaaaaaaaggaaaaaaaaagggagtgcatgcactttttgatgggcgtgcgcgtgaaggtggttcttcttttcttgcggcttcaatgcttcttttgggtttgtggttttttggcggcttcttttgctgggtcggcgctggttttaccctggttagccttgttacatctccgcttttgttcatcttctg

SEQ ID NO: 892 - DNA, 382 bp, Chlorella vulgaris
cccacgcgtccggctgcttttccttcccggagctgggctagcacggctagccttaggatacgtgcgaagtcacgcgaacgcgtggtggtctgcagcgcgtttcagcttccatccgagggggtgcaataatcaataggacttctaccccttcgtccaaactccaccttgcttgttctgcaagatgaggtgctggagcagctcaagctgaagggcaccaagggcgtgctgctgagaaactatctagggctcctgcgacaacttcaggagacaaaagagcgcgagctggaggcgaaagaccgggagctggaggcgatatcggctgtcaaggaccgggagctggaggcgatatcggctgtcaaggaccgggagctggaggcgatat

SEQ ID NO: 893 - DNA, 402 bp, Chlorella vulgaris
cggacgcgtgggcggacgcgtgggccacggtgcttgggatagctgcaggggtgtcaagcaggcatccgcaccatgcctttcaagaggtacgtggagattggccgtgtggccatgattaactacggccctgagtacggcaagctggtggtcatctcagacgtggtcgaccagaacagggccctgattgaccggcccgacgagacccgccgtgtggagaacttcaagcgccttgcaatcactgacttcaaggtggagattccccgcctggccaagaagtccgtgctgaagaaggccctggaggaggctgatgtgttcaacaagtttgctgctagcgcctggggccagaagctggccaagcgtgccgccaaggccgaccagactgactttgaccgctacaaggcc

SEQ ID NO: 894 - DNA, 354 bp, Chlorella vulgaris
  unsure (1)..(354): unsure at all n locations
gctattttggagacccgtgcataagacctgccgccatgggtcgtatgcactccaagggcaagggcaagagccgctcggctctgccctacaagcggagcccgccctcttggctcaagatttccagccaggaggtgaacgagctcattggcaagtttgccaagaagggcctgaccccctcccagatcggtgtgctgctgcgtgacagccacggcgtggcccaggtcaagtctgtgaccggcagcaagatcctccgcatccttaagggccagggtttggctcctgagatccccgaggatctgtnacatctgatcaagaaggccgtgtccatgcgcaagcacttggaggccaaccgca

SEQ ID NO: 895 - DNA, 385 bp, Chlorella vulgaris
ggagttcctgctgttccactatgtggaggtccgtaggtggcaagacatccgcaaccatcactccgttgacgaggacccaatcttcaagggcaacaaggtgcccaatgaggagatgggctaccccggcggcatcttcgaccccctgggcttcagcaagggcgacttcaagcagatgaaggagaaggagatcaagaacgcccgcctcgccatggtcgcctttgtgggctttgtcatccaggcgcaggccaccggcaaggggcccctggccaacattgccgaccacgtgtccaaccccttcgcccagaacatcaccaagaacattggcaactgcatgatccccgagtccgtcgacatccaaggcctcacactgccgctcttctgcctg

SEQ ID NO: 896 - DNA, 324 bp, Chlorella vulgaris
agtcagcctgctggtcgggttgtccgtgaggttccgcattaaggtttgaatcaaggatgtaaacatcaaagcttacttgcgaatatgccgccttaatcccggcccttatgggtgccgatgtcggtgccgatgtcatcaccgaaatcatcaacgcagccgttatggatgttgatctctatggttaccgctagtgtgccagcctgtttgacaagatgcgcatcaaggacttcatcgaggacttcagcgtcaatgttggcgctggtcgtggtgctgcccgtgctgcaggtggtgctggaggtgctgctggatgtgccgctgatgcca

SEQ ID NO: 897 - DNA, 373 bp, Chlorella vulgaris
gctggcaagaaggtcggcacgcactggggcatcttcccgcccgaggaggccgagaagttcaagccagagggccacaggaggccgcacaagaagcacgaacacaggggcaagcacaccgagcaggcggccgaggtcctgccgctgaagcgggcacagcaggttgccctccatgccgcctagggaggtctccctgaatagataggttgttgttggcggcaccccgcgacgatgcacacttgcagtttttcttggtggtggcagataatgcaagtaggggagaggcagagctgacagggcgcactcttgcaactgttgcgctgttgctctgctttctgatttgctcttcccttccacttggccgttccaagctctc

SEQ ID NO: 898 - DNA, 384 bp, Chlorella vulgaris
gccgcgcttctgacaagattgcggcgctggagggcgcgggcgtgaccgtgactaattcacctgcccagatgggcatcaccatgaagcgagtcatgcaggagaggggcctcctctgagcaccacctcagcgcgcagggcatgccaatctagctgtccagcggagcggcagctgatagaattgggcaagccagccacccctacgcgcaactaagaaaccggcgctcctgcccatgcctccgactgacaccagtagatgggtggccttggttctgtgcccgctgcgctcgaaatgctcacttagtccgggcttgctgcttggaagaaagcgggctgctgctagggctgttgttgttgcatggggaaggcttgctgctgatgcggggt

SEQ ID NO: 899 - DNA, 331 bp, Chlorella vulgaris
cggacgcgtgggcggacgcgtgggcggacgcgtgggcggacgcgtgggtgggtggagagagcacgatacaatgaagttctctacccgcgtcagctcctccaggcggaagtgccgcaaggcacacttctcggcgccctccagcgtccgcaggtcgcttatgagcgctcccctctccggcgagctgcgcaacaagcacggggtgcgctctgtgcccatccgcaaagacgacgaggtgaccgtcgtccgcggtacctacaagggccgtgagggcaaggttgtgcaggtgtaccgcaagaagtgggtcatccatattgagcggatcacacgcgag

SEQ ID NO: 900 - DNA, 383 bp, Chlorella vulgaris
cggacgcgtgggcggacgcgtgggcggacgcgtgggcggacgcgtgggtgggtggagagagcacgatacaatgaagttctctacccgcgtcagctcctccaggcggaagtgccgcaaggcacacttctcggcgccctccagcgtccgcaggtcgcttatgagcgctcccctctccggcgagctgcgcaacaagcacggggtgcgctctgtgcccatccgcaaagacgacgaggtgaccgtcgtccgcggtacctacaagggccgtgagggcaaggttgtgcaggtgtaccgcaagaagtgggtcatccatattgagcggatcacacgcgagaaggttaacggcgcaaccgtgaatgtgggtgtcgacccctccaaggttgtga

SEQ ID NO: 901 - DNA, 409 bp, Chlorella vulgaris
cggacgcgtgggcggacgcgtgggcggacgcgtgggcggacgcgtgggtgggtggagagagcacgatacaatgaagttctctacccgcgtcagctcctccaggcggaagtgccgcaaggcacacttctcggcgccctccagcgtccgcaggtcgcttatgagcgctcccctctccggcgagctgcgcaacaagcacggggtgcgctctgtgcccatccgcaaagacgacgaggtgaccgtcgtccgcggtacctacaagggccgtgagggcaaggttgtgcaggtgtaccgcaagaagtgggtcatccatattgagcggatcacacgcgagaaggttaacggcgcaaccgtgaatgtgggtgtcgacccctccaaggttgtgatcaccaagctgaagatggacaatgac

SEQ ID NO: 902 - DNA, 385 bp, Chlorella vulgaris
cagtcggctaacatcgtcagccgtccgaggccgaaacgcacgactcacggcaatgactgcgccggggcactggttactcgacatgcttcgaggcatcctggaccccaagccaaggccggtcccccagacgactagggaatccttggcgctcatccagctgctgaggaaccggctcaagtgccctcagacagccacctgagcgtgaccagcatcctcatctctcacgtggtagatgttgaccccatggtgcgcattcaggctacctcccccatgcgcttcatgaacatcgacaccatccccaagattcatcgaccacttcaccctggtcataccactcctggggcccctttgctatgcaccacatgaccacggaagaggccgcctc

SEQ ID NO: 903 - DNA, 369 bp, Chlorella vulgaris
ctcaaccgtgctggcagcagctcccgcacgacctctcacccaccagtcctagcgaggttagcaggggttcaccatgaaccaggcaatctatgtctctctgtctctcattggcctggtggccattgtgggagctggtgttggtgttggtagcggcgtggcactgatcagccagcagccgcaggcgaagactgagccaaccaagcactgagtggttagttgctgtggcatacagcagcggcagcagcagcagcagctagtgctggctagcttggggaagttgcagcttttgcaaaggtgcctggccgtgtgcctacctgacggcccgggtttgggagcgcgagtgccagttctttgccaatggctggctac

SEQ ID NO: 904 - DNA, 374 bp, Chlorella vulgaris
cccacgcgtccgcccacccttccgcaggggtgtcaaccaggcatccgcacaatgcctttcaaaaggtacttggaaattggccgtgtggccatgattaactacggccctgagtacggcaagctggtggtcatctcagacgtggtcgaccagaacagggccctgattgaccggcccgacgagacccgccgtgtggagaacttcaagcgccttgcaatcactgacttcaaggtggagattccccgcctggccaagaagtccgtgctgaagaaggccctggaggaggctgatgtgttcaacaagtttgctgctagcgcctggggccagaagctggccaagcgtgccgccaaggccgaccagactgactttgaccgcta

SEQ ID NO: 905 - DNA, 366 bp, Chlorella vulgaris
cccacgcgtccggcgcattctctgtactttcattctctgctaaaagcatggcgcactgtggagccttgacgatgcgctgcactgtgtccactgctgctgcacccagcaggcagcagcgtatgcaaggcttgcagcaggggggtaggctgctccggctacggccaaaggctgtgctcacagcacaggcagcagaattggatgtagccaagatgtctccgctgggggaccgcctgcttgtcaagccgcgggaggcggagcaggtgtcggcaggcggcatcctcctggcaggcagcccaaagcaggccatggccgatgccctcgtcggcgaggttctggctatgggtgaagacgtggagctcccgggcg

SEQ ID NO: 906 - DNA, 376 bp, Chlorella vulgaris
gccaaaacgagatgattgacaccatcgccatcaccaagggccacggcactgagggtgtggtgacccgctggggtgtgtcccgcctgccgcgcaagacccatcgtggtctgcgcaaggtcgcctgcatcggcgcctggcacccggcccgcgtgtcctggaccgtggcccgcgctggtgccatgggttacaaccaccgcacggagatgaacaagaaggtgtaccgcgtgggcgtgaagggcgacgccagccacaaggccaccaccgagtttgatgtgaccgacaaggacatcacgcccatgggcggcttcccccactacggcgaggtcaaggaggactacatcatgatcaagggtgcgtgccccggcaccaagaagcg

SEQ ID NO: 907 - DNA, 408 bp, Chlorella vulgaris
caggacgcgtgggtggcaagatggcgcggggcccaaagaaacatctgaagagattgaatgccccgaagcactggatgctcgacaagcttgggggcatctttgcccccaagccgagcgcgggcccccacaagacccgggagtgcttgccgctcatcctgctgctgaggaacaggctcaagtacgctctgacgggcaaggaggtgacgagcatcctcatgcagcgcctggtagaggttgaccgcaaggtgcgcactgacaagacctaccccgtgggcttcatggacgtggtcaccatccccaagaccgacgagcacttccgcctggtctacgactgcaagggccgctttgtggtgcaccgcatcagcaaggaggaggcggcgtacaagctgtgcaaggtccgccgcgtgc

SEQ ID NO: 908 - DNA, 295 bp, Chlorella vulgaris
acccacgcgtccgctgaaccagttcaactggtttaagcacggctctgccctcaacgcaatgaaggttgcccacgagggcgcatagaggctaggaagcaggctgctgctgctggtcgggcagcggctgccagcagtgacgctgaacgtcctttctggtggtggccgggcccagctagcgtttgtggaggagcagcataagggccgtgtgggggggagcgccgggcgacttggctttgagggccttgcctggggccgcctctcatggccctggtcgctgccggggcttcatgtgtgc

SEQ ID NO: 909 - DNA, 391 bp, Chlorella vulgaris
gattttaggccatcctgaaaacaagcacgatggccaaaatcaaggcccatgagctgcggaccaagagcaaggccgacttgctggcccagctgaaggaccttaagcaggagctgggtgcgctgcgtgtcgccaaggtcactggcggtgcccccaacaagctctccaagatcaaggtggtgcggaagtccatcgcccgcgtgttgaccgtggtcaaccagaccacccgcagcaagctcagggaggaagttgccggcaagaagtacgtgcccctggacctgcgcgtgaagaagacccgcgccatgcgcagggcgcttaccaagcatgagaggaccgtccggactgagaagcagaagaagaaggacgcagccttcccccgccggaagttcgctgt

SEQ ID NO: 910 - DNA, 332 bp, Chlorella vulgaris
aggatgggtggtcgggagaaacgagacgggagacagggggacacgcaggttgagaaagaccggtggtccttggcgttggagcgggttcaggtttatgccggggtctatccttgtagttttcgctagtcggtgagaacgatttagcttggatgcaatcgtagcatgcaagcctgtcggttaccagtagttttgatgtacagtttcagcgtactttgcacgcaagtgctaggctgtaatctggactgcttgggcatgtgctgtattgttatagttgttctaaaggcgaggtcagcttgcccctgtggcagccgaaatactgtatgcttgtatac

SEQ ID NO: 911 - DNA, 384 bp, Chlorella vulgaris
aagggcaagaccgaggccgagctgttcaagcttaagaccaacgagatcaggaacggccgcctggccatgcttgccatgctgggctatggcgcccagggcgtgctgaccggcgccggccccttcgcctgcctgcaggcacacctggctgaccccgtccacaacaacctgctcacaaacttcgcccgcgtgtacggcaattgagcacttggctgccttgtgctggaaagcagcatccggagcagcagggccgatgcggctgtctgtaacaatgtagtgtggggcttgcaacctttgcttggcccggcgtgaacggttgcttgttcgtgggtgggagcaccgcttgtaggcagacactgagaagaatgaaagaagtctaccaatttt

SEQ ID NO: 912 - DNA, 383 bp, Chlorella vulgaris
cccacgcgtccgcccacgcgtccgggtgcagcaaccatggggcgccgcccagcaaggtgctaccggcaaatcaaggggaagccgtaccccaagtctcgcttctgccgtggtgtgcctgactccaaaatccgcatctacgacgtgggcgcaaagaagtctggcgtcgatgccttcccttactgcgtccacatggtcagctgggagaaggagcacatctcctctgaggctcttgaggcggcccgcattgctgccaacaagtacatggtgaagaatgcgggcaaggacgcgttccacctccgcgtgcgcgtgcaccccttccacgtgctgcgcatcaacaagatgctttcgtgcgccggggctgataggctccagaccggcatgcg

SEQ ID NO: 913 - DNA, 402 bp, Chlorella vulgaris
gcttcagccagcctttgcaaaggttcctcgaagtctccacaatggccgccgctatgtgccagacctctgttgcccgggccttcgcccctaaggtggctgcccagaagcgccagcgcgctgttgccgcccaggcctatgttggcaactggctccccggcagcgaccgccccgcctacctggagaagctccctggtgcctacggctttgaccccctgggcctgggcactgagcccaagagcctggagcgctttgtggaggctgaggtgattaacggccgctgggccatgctgggcgttgccggcatgctcggcgtggaggccctgggctacggcgactggtacagcgcacccctctgggccgtgactggcggcaaggcgacctactttggcgcggagctgccct

SEQ ID NO: 914 - DNA, 357 bp, Chlorella vulgaris
aggacgcgtgggcggacgcgtgggggctgaggctatctctgccggctcttcgccgctcagctgaatcacttggtgctggtgagcagggcagtggcagttggaaactacttagatagctgcttgggacgtatccatacggaggccatctttgctggtgcatcggccgccctgcttacctaaaaaaactccggtggtctaatgactttgcagcccttctgctagggactgcggctaaggccttgtgcccctttatgtcagctcagctgatctaacgccgctgggctatgctgccctttgcccgcatgctcatcatggacgccctcgtcctacagcgacttctacagcgcacccctctgg

SEQ ID NO: 915 - DNA, 351 bp, Chlorella vulgaris
cggccacgcgtcgaggcaaccaaggcatctgcgggcatgggcggtggcggcatgccgggcggcctgactatgtaactaccttgatacgagtttgtctgctgcttgcttgctgctggtaccatcccagttgggtccctgcactgccctctaggtagtcttttacatctttggtgaaccataggtggcagtgcttcatgtggtgcccattggcgctagctgctgcgcgtagggcctggctctctcctgacctacatctctctgctatcgctctcatgcttggcacttcagaaaacttcccaaactgctcagccgtgaaatgggtaatcaggttgtaacaactcattacagttg

SEQ ID NO: 916 - DNA, 402 bp, Chlorella vulgaris
acgcgtccagtgcaaaatggcgagcaaggtgtccggcgaggtgctgcgtgagggtatcgctggggtgctggagggctccaagtccaaggcccgcaagttcacggagaccgtggagctccagattggcctgaagaattatgacccccagaaggacaagcgtttcagcggctctgtgaagctgccttactgcccccgtccccacctgaaggtgtgcgtgctgggtgaccacaagcactgcgaggaggcccagaacgcgggcattgacgcgatgagcgtggatgacctcaagaagctgaacaagaacaagaagctggtcaagaagctggccaagcagtatgccgccttccctgtcctctgacagcgtgatcaagcaaatccggcgtctgctgggccccggcctga

SEQ ID NO: 917 - DNA, 404 bp, Chlorella vulgaris
aaggagcttgacaaggatgtgaagaagtactttgttagcggcggctttgcattcatccaccccgactcctcggctgacatttgtgctgtggaggctgttgacgtagcagaccttgatgcggacgcagtgcgtgccggccttgctgactacaccgccaagctggcgtccgcccaggggaaggatgactacgaggcggctgcagcccaggtcggcgtggaagtctactccgccatgaatgctgccctcggccagtgagctggagctggcagccttgtcatgttgatgtcgttgggagctcctgttccgcggctggcacccggtcatcggttgtatgcagaggcaagcggctgtctcaaaattggcgcagcggctggggctgccgctgcgcaagcttgcgggagggt

SEQ ID NO: 918 - DNA, 428 bp, Chlorella vulgaris
ccggactacggatgggacaccgccggcctgtccgccgaccccgagaccttcaagcgctaccgccagattgaggtcatccatgcccgctgggccatgcttggcgccctgggctgcatcttgcccgaggtcctgcagaggtacagcggcatcgagttcggcgaggctgtgtggttcaaggctggcgctcagatcttctctgacgacggcctgaactacctgggcaaccctgccctcatccacgcccagtccatcattgccaccctcatcacccaggtggtgctgatgggcgccgttgagggctaccgcaccaacggcggcggctgggagtgggccgagggcctggacaacctgtaccccggcggcgactactttgaccccctgggcctggccgacgaccccgaggccctggccgagctcaaggtcaagga

SEQ ID NO: 919 - DNA, 442 bp, Chlorella vulgaris
caagccttcgccagctttccccttggtgccggcccctggcttgaacgggtaacctggccacccaaccttggcccaccggcttccccctggccctgggagctgatcccacattggtggcccctggcctgcttgaactgcgttcctttgctgctttcgcatactctctggggggtgcactgtgagctgcggggtaggcgctgagcaccgctgcttgtgcagccccgcaagcctccaggccccttcacccttctccctgacaagccgatcagtactgtcctcctgatccctcagcgctcttcactgtttgcattttgggtgttaggcttgcgtttttgctggcttcatgacttcttgcgcattcggtccggattgtttcgcagattctttcacccatgtgttcagcccttgatacaatttgggctgggtctgttgctgtgttgat

SEQ ID NO: 920 - DNA, 281 bp, Chlorella vulgaris
ttctgtaccgaaaagactcaactgccggacaccccagattgacggggtgtccaacctggaggtcatcaagctgatgcagtccatgaagagcaaggacttggtcagccagcgctatgcctggcgccactactactggttcctgacggactcgggcatcgagcacctgcgtgagtacctgaacttgcccagcgagattgtgcccgccacactgaagaaatcgaccaggcctctggagcgggagggcgcacgcccgccgcgcggcgacaggccgccccgccgct

SEQ ID NO: 921 - DNA, 466 bp, Chlorella vulgaris
  unsure (1)..(466): unsure at all n locations
tccacacatccgcacacgcgtcggaccccgggaacgagcagacgcatcagcccaagcgattgaccgggcagcggacgtgattgcctgcgcacagacctgctttgatgcggcagcgcggttgatccggccaggcaagaagatcagcgaggtgccgccagtgctggccaaaatagcggaggcgtatggctgcaaccttgtggagggcgtgtacagccacgagatgaagcggtatgtgattgacgccagcaaggcggtgctcaaccgacccacccctgaccagaaggtggaggacgccgagtttgaggagggggaggtgtacgccatcgacatcctggtgtcctcgggcgagggcaagcccaaggtgcatgacgagaaggagacgacggtgtacaagcgggcgctggaggtgcagtaccagctgaagcttaaggcctcacgggaggtcctgtctganattagcaagaag

SEQ ID NO: 922 - DNA, 362 bp, Chlorella vulgaris
cttccaagtggccggggagaaactcaaggggcccaaccgcaagaattttgtggagttcctggaacccgggtgcacggcaaagttctccggcttcctgctgtacaaagaactggggcgccccctggccaagttcaacccccccctggccgaaattttcaacctgctgtcccgccatgaggcccgccacgccggcttcatcaataagggcctgtctgacttcaacctggccctggatcttggtttcctgaccaagaaccggcagtacacgtacttcaagcccaagttcatcatctacgcaacttacctgtcggagaagatcggctactggcgctacatctccatctacaggcacctgcagcgca

SEQ ID NO: 923 - DNA, 334 bp, Chlorella vulgaris
cggacagtctcacctgtcttccgttactgcttttgagcagaatggcggctctgacctctgcgcctgtgctgcgggccttcgcggctcagaaccggctgcctactcgtgccagccgggctcagaaggtggccgtccgtgctgttgccgaccagagtgcggtgaaggatgctgtggtgaaggcctgcactgtggcgaccatggctggctccctctcttgctgctggccatgcccatgcctgcatggacgtccccaccctgcgttgccccccgcaccccccctgcctgcccgccacgcctcgcgggctccccctgccccggggccgggcttgccgcc

SEQ ID NO: 924 - DNA, 366 bp, Chlorella vulgaris
  unsure (1)..(366): unsure at all n locations
tccacccaggcgtccgcacgggcatacaacgccgaggtcatgcccggccagtgggagttccagattgggccggtgggcgccctgaatgttggggaccaggtcatgattgcccgctggctgctgcaccggctgggggagggagttttggcatcattgccaccttcgcgcccaagctcatgaagggcgactggaacggcaccggcgcgcacatcaactactccacggagagcatgcgcaaggacngcggcatgcgtgcgattgacgacgctatcgagaagctgtccaagtgccacccgggagcacattgctcagtacgggtacggcaacaatgagcggctgaccggcaagcacgagacatgcgacatc

SEQ ID NO: 925 - DNA, 412 bp, Chlorella vulgaris
tccacccaggcgtccggaacctcaatctggttaagaaacactgctggcgcagtcaaacaactatggtccctgtgttgtacacaggttcccattgttaaaaaaccgaaccatgttgcggggtctggcacgacagctaaaaagcccgtcggtcctgccgaggctcgcctggggaacggtgtgctccaaggtggcactgcaacgcactgcctggcaaccgccagctgcgctgctgcacggctttactccagcagctccagcaaccagcagctcaagagcctgatatacaatacgggcccaaagccactggagttcctacggccgcattgggcgcctgcccctggtgtggaggaaagcctcttgaagcgcatcatgctgcgcctgtttgggttttacaccaaggaggccacctaca

SEQ ID NO: 926 - DNA, 333 bp, Chlorella vulgaris
gctgaggtcatgcgcgggcattgtgaattccagattggcccggtgggctccctgaaggttggggaccaagtcatgattgccctctggctgctgcagcggctgggggaagagtttggcatcattgccaccttggcgcccaagcccatcagtgtcgactggagtggcaccggcgcgcacaccatctactccacggagagcatgcgcaatgacggctgcatgcgtgcgattgacgacgcgatcgacaagctgtcgatatgccacccggagcacattgcgcagtactggtaagggaacgatgagcggctgaccggcaatcaggagacatgccacatc

SEQ ID NO: 927 - DNA, 278 bp, Chlorella vulgaris
gtccgcaagaccgaggggcagtcatgcagctcgcagccagcagcctgagcagccggcattgccttgttgcagcgaccattcgtggcagtcaagcctgctggccgccctgcgctgcggcccatggccgtgtgcccagtggcgaaggctaccagggccagcgagctgaggagcctttctaaggaggatattgagcgccaggtggaggaacgcacgagggagctgtgcagcctgcgcatcaggtttgccacgcgtgaggagtacgatcccagtgacctatc

SEQ ID NO: 928 - DNA, 325 bp, Chlorella vulgaris
tggggccggaagccccttgaagggcaaaacaaccccaaagtttattgccccatccaacccaacgctgtttttgttccccttccggaaaagcttaaaccccacaatttttaaggttgaacaaaaagtttttgactttcaagtcctaaccaataaacgaagctagctgcccacgtgctgaaggcttaaaagcgcaataaagcccacctcacagcaccggtggtctccaacgatgcgcacttcttgcaccacgtgctggccaacacagtgaacgggaccacctacgctggcattcgggcccgaacaacaggcgcgccgcaaaaccact

SEQ ID NO: 929 - DNA, 454 bp, Chlorella vulgaris
tcccggggcgacccacgacgtccgcaattattcagtccaagcgcctgaggaacaaaattgctggcttcaccacgcatctgatgaagcgcatccagcgcggcccagtgcgcggcatctccctcaagctgcaggaggaggagcgtgagcgtcgcatggactacatccctgacgagtcggccatccagaccgacgcgattgaggttgacaaggacaccctggagatgctccgcggcatgaacatggccaacctgcccggcatcagcgttgtgcagccccagactggcggcttccagaggcgcgagggtggcttccagggtggcttccagaggcgcgacaggcagtgacaggatgagcggcattttcagctcagggtggccccagccgtactcagccattaagagcggccactggattgttgggaccctaggagtgtaatgcaacgaagcgcaaaata

SEQ ID NO: 930 - DNA, 340 bp, Chlorella vulgaris
cccggggtcacccacacgtccgcacatgcgtcctcccacccctcggcgaccatgtgtgtgcgcatgccggctcatctgctgctggacaacctggacatcccatttcacgacaacggcctctttgttgtggtcgaggacgctgcgcatttcatgtacaacctcctgtccaaggtgctgtcagccaccaacgtcatgctctgtaatgcggcagccctggaggacctgattgtcatggaggatgccgccctgggtgggcgcaatgtggtgggccccgtgactagctggatcctgatgccccagggtcgtgtcaaccgtatgttcatggagcccaacgtgatct

SEQ ID NO: 931 - DNA, 140 bp, Chlorella vulgaris
ccacacgtccgcagacgcgtgggctggcctgcagcatcgccaccatgagcttcgccaatgacccggccgtgtactatgtggtgggcactgcctttgcggtgccggaggagcctgaccgacgaggggcctcaacctgtctg

SEQ ID NO: 932 - DNA, 470 bp, Chlorella vulgaris
ccggggtcacccacacgtccgaattcttgttaatagttatcgaggggacaatgcaggccactatgtcgagggtcgctctgggcagcatcgcgggcctgaggcccgctgctactgttcgtcccagggccagcaggacggtggtgagggccatggctgacaagccggcccctggcagcctgcaggttgtagcgcccatcaacggcgacccctacattggcatgctggagacccccgtgacctccgcacccctggttgcctggtacctttccaacctgcccgcctaccgcaccggcgtgtcccccctgctccgcggcgtggagattggccttgcccacggcttcttcctggtcggccccttcatcaagcttggccctctgcgcaacactgacgttgccgacattgtgggctgcattaacggcgccgccctggtgctgattctgacacttgcgctgactgcatacagccagacg

SEQ ID NO: 933 - DNA, 449 bp, Chlorella vulgaris
  unsure (1)..(449): unsure at all n locations
ccaccaggcgtccgaacgctctcaagggctccaccgaggcatcgcagttttaagctgccggcagcttggggggtcaccagctagtgctggtggagtgctactttgacgtatggctgctgagcgggctagtaggtggtgccctggcaaccccaacccccttcaaagagggtatgaaggtggttgaggatcatgtcgcctgcacgagtttttggcgccggcagctgtcgttggtccttgatatgttcaggcaatgcatgcgtacgttttcaggcgatgcggccatgatacctgccttgcggtgtctgtgttttagtggggggattccaggtgtgagtgggacagtcgctacaaagttcagcagtgcattgatccgccttccggcagcatcaacatgccccccagtgtactaagtagtaatgtgttttgaggtanttgtgttgggttttgtg

SEQ ID NO: 934 - DNA, 319 bp, Chlorella vulgaris
  unsure (1)..(319): unsure at all n locations
attttcaaaccccccttccgggccaaggaataaattctcctctcaacttacctaacaaactacaaggtcggccagtatttggacgtcaaggtaaacngcccagtgcacaanggcatgccccacaagtactaccatggcaagactggccgcgtgtggaacgtgaccaagcgggcagttggcgttgagatcagcaagaaggtgaacgggcggatcatcaacaagcgcatccacgtgcgcattgagcacgtgaggcccagccgctgccgcgaggagttcctgcaaaggtgcaaggagaacgatgccaagaagcacgcggcca

SEQ ID NO: 935 - DNA, 228 bp, Chlorella vulgaris
gtccggactgtttgtggggttcccccttaaagtttgcattcaggcaccaaccaaaaatgtccaagtctgagcttgcctgcgtatacgccgccctgatcctggcggatgagggtgccgatgtcagcgccgacaacatcaccgcaatcgtgaaggctgcgggtgtggatgttgagccgcactggcccggcctgtctgctatgcaggccgacaagacgcgcatttaggagt

SEQ ID NO: 936 - DNA, 375 bp, Chlorella vulgaris
ccggggtcacccacgacgtccgcacacgcgtccgcccacgcgtccgccgccatgtgtgtgcgcaagccggctcacaagctgctggacgagctggagatcccatatgaggacgagggcaactttgttgtgatcaagcacgccgcccagttcacctccaccctcctgtccaaggtgctgtcagcccccaacgtcaagctcttcaatgccacagcagtggaggacctgattgtgaaggaggatgccgccaagggtgggcgctatgtggcgggcgccgtgaccaactggaccctggtctccctcaaccatgacacccagatgtgcatggaccccaacgtgatcgagtctaaggtgatggtcagctcgacgggccacgac

SEQ ID NO: 937 - DNA, 274 bp, Chlorella vulgaris
ccacgacgtccgcaaacgcgtccgaaaaaaaataaaaaaaaaaaaaaaaaaaataaaaaaaaaaaaaaaaaaaaagaaaaaaaaataaataaaataaaaaaataaataaaggggagtggaacaatatgattctgtaataggtgaagcttgatattaagtttagggggggtcaatagtttggctcatgatatgttcaagggtgggttttttctaatttatagcgtggtatccattcgcctttacccagttgggtgtctttgtgacaaggccccct

SEQ ID NO: 938 - DNA, 452 bp, Chlorella vulgaris
  unsure (1)..(452): unsure at all n locations
gtccggatcatgatcatcggctccaccgcaggtgtgccggtggcgtttgtttccccgggggcccctgggcaatggccattgggccaagaaactcaccgagtcaacaacctcacgcaacctcccggggcatcactggggcggtcctcatcatcgtgggcatcgtcatcggtctggcgggcatcatccgtgtgattgcgtacaacgaccctctggctggctaaatggcatgctgccaggccggtgaggtttcagagtgcacagcaggtgccgctccagccgatgctgtgtgtaaaccacaatgaaggagactccttggacccacgcagaaggctgacgcctgatgctgggtagtaggtatgttttgagcctgttcacagtgtcctataacctttccgtgtaggcatgtnattactgacgcttaaacctgcaccgtcgtggcgtgcttttcctct

SEQ ID NO: 939 - DNA, 364 bp, Chlorella vulgaris
gtctgtcggcgattcccaaacctcgctgcctaccgcgaggttgaggtcatccatgcccgctgggccatgcttggcgccctgggctgccctgaccccgagctgctgcagaacgccggcgtggccagcttcggcgacgctgctgtgtggttcaaggctggtgcctccatcttcggcgatgatggcctgaactacctgggcaacccctccctggtccatgcccagtccatcgtggccaccctggccgtgcaggtcatcctcatggctcaggctgaggctttccgtgtgagcggcactgccccctggagcggcgaggagctcgacaccctgtaccccggtgatgcctttgacccccttgggctggctg

SEQ ID NO: 940 - DNA, 249 bp, Chlorella vulgaris
ccacgacgtccgcacacgcgtccgcccacgcgtccgcagttatgtctgcgacacctgtgagtcgggctggcactgtggctgcctcgacccatccctcgcagctctcccccccgacggctggcagtgccctctctgctcagcagatgcaggacatacttcacctggtgcggcaccctgtagtgcccacgtgtctgcagcagacccaacggctctctacctcgtccgccccagtgcaagaccaccgcccac

SEQ ID NO: 941 - DNA, 424 bp, Chlorella vulgaris
ccggggtcacccacacgtccggatggaatcccccgtcgacaacaggtccaaggttcacaagatgcagaccctctctgcccgtttcggcgtccgcgcccctgtctcccggggcacccgccaggtgacccgcgcctccgtggagtggtacggccccgaccgcgccaagttcctgggccccttcaccaaccccccttcctacctgaagggtgagttcgctggcgactacggctgggacacctctggcctgtccgccgatcccgagaccttctcccgctacagggaggttgaggtgatccatgcccggtgggccatgcttggcgcccttggctgcgtcatgcccgagctgctggaccgcaacggcaccgtcaactttggcgagaacgccgtgtggttcaaggccggtgccgccatcttcggcgatgac

SEQ ID NO: 942 - DNA, 185 bp, Chlorella vulgaris
gtccggacagtgaagcagttgttagtactacagcagtagcgtcattggctaaaggttcaactggttttgaggcccagttgcagacggatggtgtccctccagttcacgagcctggcagtcgtgggactagcagtcacattgccgttcttgctggacttgcaagctgcggggacagccgctgtgtt

SEQ ID NO: 943 - DNA, 310 bp, Chlorella vulgaris
cgcatactatcagctgcatttcagccagtagaacagagcagtcatggcgtcccagctgcttgccacccgccctggcctccgtgtggcccctgccaccagcactcgcctgagccgccgctccgttgttgtgaaggccgccaacctgagcaccatcgagaagcagtacaaggagttcagggtcccccagatccctgtggccaccgtgtttggcattgccggctggctggtgcccgctggcagccccgccactgccttcggcggtcgctctctcctgagtgtcgtgcaccaatagcatcggccaggagcctcc

SEQ ID NO: 944 - DNA, 235 bp, Chlorella vulgaris
ccaggcgtccggagatgcaagcccagacgtgggggcgcccactggcgtggttggcctataggatcctggattccttccaaaccgcatcaagagggatgctgcgtaccgggaagaccgcaagaacttcaccattgagcgggcacaggatctgccggccacgctgcgagttgtgcagagcccggcagagcacgagccgtagtgagggactggccttgagctggttgccaggtctgcc

SEQ ID NO: 945 - DNA, 451 bp, Chlorella vulgaris
gtccgaatggaccatggccaacttctgttgtgggcgaccagatgccgcgacctcattcctgtgtggattggccggggtatgctgaggtgttgggctgaactgtaggcggctagcagggtgggtgtggcacaaggtgctgcgttggctgggcgaagggccgagagtgtagaaaactagccggtgccttgtcagtccacctgcctgagcccagctcaggtgggtgggtgccagaataaccgaggcacctgctgttggcttgctaggcgacgaatgaatggaccctgactgctcgagaacttgttgacagtcctacctcccgtcctgcctgtttttgtgtcccactatgcctggcagctttggtgtaccgtccttcgctgccggcctccgccattcctttcgagctcaattgatggtggcaagctgtgtgtgactgcctaacaaccgagccccc

SEQ ID NO: 946 - DNA, 446 bp, Chlorella vulgaris
  unsure (1)..(446): unsure at all n locations
tccacccaggcgtccggagaagccaatgctcaaggcgggccgcagcttacacaagttacgcgtcaagcccaacaactggcccaaagttccttgtgttgccaagaaacccgttgaacatcccccacggttggtgtaaaccacaagcacattggccacgcctccaccgtgcggagggacgcgccgcccggccagaaggtcggcctcatcgccgcccgcaggacangtcgtatccgcggtaccgccattgtcaagcccgacaaggagtaagcgttggcaaaggaagcggcggcagcagtgcagccgtagagggctggcgggaatgggcagcggtggctcttggcggcggtgtgctggtgttgcggctgccctacctgcctttagaatcgatgtgtgcagaggtcaaatcttgcagaagaagctgcagcaaagccggttgtgtaatangg

SEQ ID NO: 947 - DNA, 458 bp, Chlorella vulgaris
tccacccgcgcgtccgcaggccctaacatcaagatgggtcgtgtcatccgcgcccagcgtaagggtcgtgggtcggtgttcaagtcccacaacacccacaggaagggcgcagccaagctgcgcgtcctggacgccgcagagcgcaatggctacatcaagggcgtgattagcgacatcatccacgaccccggccgtggcgcacccctggccaaggtgactttccgccacacccacaagtacaagcacgacaaggagctgttcatcgcccccgagggtgtgttctctggccagtacatctactgcggcaagaaggccaccctgaccattggcaatgtgaagcccgtgggcgacatgcccgagggtaccatcgtgtgcaacgtggaggagaaggctggcgaccgcggctcactggcccgctgctctggcgactacgccatcattgtggcgcacaaccctga

SEQ ID NO: 948 - DNA, 444 bp, Chlorella vulgaris
  unsure (1)..(444): unsure at all n locations
gtccgcacacgcgtacgcccacgcgtccgctggtgatccccgtctcccaatagttcccaggcaatcactatgcangcaaccatgatgaagaccttcggcgccagcctgcgcaaggctgtgcccacccaaggcaagggcacccgccaggtgacccgcgcctccgtggagtggtacggccctgacagggccaagttcctgggccccttctctgagggctccacccccagctacctgaagggcgagttcgccggcgactacggctgggacactgctggtctgtctgccgatccccaaaccttcgctgcctaccgcgaggttgaggtcatccatgcccgctgggccatgcttggcgccctgggctgcctgacccccgagctgctgcagaacgccggcgtggccagcttcggcgacgctgctgtgttgttcaaggctggtgcctccatc

SEQ ID NO: 949 - DNA, 131 bp, Chlorella vulgaris
cccggggtcacccacgacgtccgcacttcgcagcagcaaacaatggcagcagttgaggaggttgagagggttgagcaggtggaggacgtcgaggatgacgtcagtgacgatgtcagtgacgacgacgaggg

SEQ ID NO: 950 - DNA, 454 bp, Chlorella vulgaris
ccacacgtccgaagacgcgtggggttttctacagtagccgaggcctaggggcgaagggtgcttcttcactcagacacggctcctgccgatcgtctgaggaaccgtgcatcatgacttcgaagttccctgcacacgcaatcacaagggagcccgcgcggacgactatagtgaacagccttaaggagatgtggccctttgttgcgggcttctctctaactggctatatcttcacaaaggttgccctgtcagtgacagatgaggatgtgaagaactcaaagtttgccaaccccaagggccacagccactgagccctgaactggcaggcagctgggaagcagcgagcggcagtcctcggcggacagaccggtgtaagtgtaggccgtaatgcaacgctgcgcacggctcctccgttgcagcatactgcaacagccgggatgtgagcggcagtgctgtt

SEQ ID NO: 951 - DNA, 416 bp, Chlorella vulgaris
gtccggagccaccaagattatcaggatgggtcgccacaaggtgtctaagagttcggcgtacttcacccggttcaagttaaattacaaccccaggcccaagggcaaaaccaactaccgcccccgcctaaggctttgcaccaaggataagaacaagtacaacacccccaagtaaaggctggtggtgcgcttcaccaacactgacgtggtgtgccaggtggcatacgccacgctctccggtgatgtcctcgtcagcgcagccctaccccatgaactgcccaactatgggctgaaggtgggcctgaccaactatgctgccgcctactgcaacggcctgctgctggcccgccgggtgctgaccaagttcggtctggccgagacctacgaaggcaacaccggcagccccggccaagactaca

SEQ ID NO: 952 - DNA, 412 bp, Chlorella vulgaris
  unsure (1)..(412): unsure at all n locations
gtccaccacgcgtccgcaaacgtttgtangcccatcctttagcggcagcaaggcacgatggtgcagattggcaagaaggctgctaccggccctaaaaagggcaagaaggccctgaccttcacaatcgactgctccaagcctgtggaggacaagattatggagattgcctccttcgagaagttcctccttgacaagatcaaggttgagggcaagacaggcatcctgggtgacaacgtcaaggttgtgcgcgagaagaccaagatcacggtgaccagcgagattgccatgagcaagcgctacctcaagtacctcaccaagaagtacctgaagaaacacaacgtgcgtgactggctgcgtgtgattgcgtccaacaaggaccgcaatgtatacgagctgcgctacttcaacatct

SEQ ID NO: 953 - DNA, 458 bp, Chlorella vulgaris
tccgcacagcgtacgaaaaaacgtcccccatggcttcaaaaaggaaagggcggcgttggtggcaacaagttcaggatgtccctgggtttgccagtggccgcaacaatcaactgcgctgacaactccggcgccaagaacctgtacatcatctccgtggccggctggggcgccaggctgaaccgcctgcccgccgccgcccccggcgacatggtgatggccaccgtgaagaagggcaagcctgacctccgcaagaaggtgcaccctgcggtggtggtgcggcagcgcaagtcctggaggcggaaggacggcacctacatctactttgaggacaatgcaggcgtcattgtgaaccccaagggcgagatgaagggctccgctattaccggccccgtggcaaacgagtgcgccgaactgtggcctcgtgttgctgccgctgccaacaccattgtctgagcgac

SEQ ID NO: 954 - DNA, 428 bp, Chlorella vulgaris
ccgcacagcttcactcacctgggtctgtgtaatttgctgcccgttgcccaagcacctgctgaccttgtggcggtgcatctggagcatgtcagcactgttgcaccctgcccagctccgttgcactggcagcatcaacctaagccataggtcgaacagggtgctcagcgctcgcctggaagtccaccctgcactcaagaccccaactggccgtcgctcattggcgatccagcagcgtcgcagcagcaactctatccagatcagtgcgggcgcagccagcatggagggctttacagtgaagactgtgcccactaagcccatagagggccagaagactggcaccagcgggctgcggaaaaagaccaaggtcttctcgggcgacaactacttggccaactggattcagtcactgttcaacgctttgggcgatg

SEQ ID NO: 955 - DNA, 109 bp, Chlorella vulgaris
cacgcgtccggatctatatcgcgtgccgggatcggtctccacaaggtgtctaatagttcggcgtacttcagccggttccagttgtagtacagtcgcatgcgccacggcc

SEQ ID NO: 956 - DNA, 323 bp, Chlorella vulgaris
ccggggtcacccacacgtccgcatagatggcgaaggacaagtctcgctccgccgaggtggtgacccgcgagtataccattaacctgcacaagaggctgcatggcataaccttcaagaagagggctcctaaggccatcaaggagattaagaagtttgcccagcaacaaatgaagaccagcgacgtgcgcgtggacgtcaagctgaacaaggccgtgtggatccagggcatcatgaacgtgcccaagcgcctgcgcattgtgatccagcgcaagcgcaacgaggacgacgaccataacgaggagatgttcgctctggtcaccctg

SEQ ID NO: 957 - DNA, 236 bp, Chlorella vulgaris
ccgcatacgcgtaggcccacgcctccggatggaccagcggatgtacgtgctcgaggcgaaccgctgcagcgcgcttgtgccagaggaccgcgacaggatgaggtcgaggacatccccaaagccaatgttgatatggctaacgctcggaagtagcgctagacctccgattttggttgcaacctgtacatctacaaggtaccttaactgatggatgggtgcggtcgcaatcactatac

SEQ ID NO: 958 - DNA, 314 bp, Chlorella vulgaris
tccgcagacccgagggcggacccttgggggactggcagccgtggtcaggtgacccaggtgcgcgtgaagttcctggatgaccagaaccgcctgatcatgcgcaacgtcaaggggcccgtgcgcgagggtgacatcctgaccctccttgagtctgagcgcgaggctcgtcgcctccggtaatgcgggaggagctgggggcgctggcgcaagatgtgacccctgcgcgcctggaacagcagtgtgtggatggcgtgcagcgtgtagcaacaacactggcagaggggggctgggtgggccccttttgtgtgcagctg

SEQ ID NO: 959 - DNA, 438 bp, Chlorella vulgaris
gtccggacttgtcatcgccgccaggaggcctcttcgagccctgcctggctatcccacttaggacaagatgccgcctaagcgtaggagctctcaggaggagaatgtcaccctgggccctgccaccagggagggtgagctggtgtggggtgtgtgccacatcttcgcgtccttcaatgacacctttgtgcacgtgactgacctgtccggcaaggagaccctggtgcgcgtgactggcggcatgaaggtcaaggccgaccgtgacgagtcctccccctacgctgccatgcttgccgcccaggacgtggccgctcgctgcaaggagctgggtgtgaacgctctgcacatcaagctgcgcgccactggcggcaaccgcaccacgactcccggcccaggcgcctagtccgccctgcgtgcgctgggccgctctggcctcaagat

SEQ ID NO: 960 - DNA, 404 bp, Chlorella vulgaris
  unsure (1)..(404): unsure at all n locations
cggagtctatatctcgtgccaggtagccaagaagcagcgtgcaggggcaacaccttatcatggcggcccttggctcctgcactatgccccgcagcctctgcttccgcagtaacgttgcttccacacaacgcctaacagcgtcgcgggtgcagacggtggccgctccccgtgcgcccctgacagtggagaacaaggtggcgatccgcttttcacggctagggcgcaagaagctgcccttctaccggatagtggcagtggacagccgcgcccggagggacggcaagcctattgagtacctgggctggtataaccccattgccaaggaggctaatctgaacgcaccggctatcaagaagtggctgtctgtangggcacagccgacggagacagtcgcaaatctgttg

SEQ ID NO: 961 - DNA, 434 bp, Chlorella vulgaris
  unsure (1)..(434): unsure at all n locations
cacacgcgtccgcccacgcgtccgccaagatggaaaacctctactcaagaagaaggaaaactaaggaaggagaaaggaagcggaaagaggtccgggcccctgacgacagcaacactcaagtcactcttcgctgaccatctcagagcgtggcagcatggccaggagctaagtgtggagcagcttgcaagggagtatggcgccaatgctgaagtgctgaagcgggttctgctatataaccgagtgccagcagtacagcaggcgcctgatggcaggctcataagtacatggccggagtgaggatagcgtgtaggtgtgtggcctcgttccaattgtatcagtaggccttaggtagactcgtaaagctggacttgcatataggtgcaagcangtangcacagtacaagattaagagtggggactaagattaaaagatt

SEQ ID NO: 962 - DNA, 73 bp, Chlorella vulgaris
ccggatctcttaagtgtgcccctggcccgcatcctgaggtagctactcgtccagactacctggctgcgcacct

SEQ ID NO: 963 - DNA, 427 bp, Chlorella vulgaris
gtccggcagccatagtgtcgttgcggcttcaaaagaggcttgcagcctccgtcctgggctgcggcctcaggaaggtgtggctggaccccaatgaggtcaatgacatctccatggccaactcgaagcagaatgtgcggaagctagtgaaggatggcttcatcatccgcaagccagagaagatccactcccgtgcccgcgcccgggcgtcagcggaggccaaggctaagggcaggcacaccggctacggtaagcgccgcggtacccgcgaggcgcgcctgcccaccaagatcctctggatccgccgcatgcgcgtgctgcgccgcctgctcaagaagtacagggatggcaagaagatcgacaagcacctgtaccacgagctttacatgaaggtgaagggtaatgtgtacaagaacaagcgtgtgctcat

SEQ ID NO: 964 - DNA, 382 bp, Chlorella vulgaris
  unsure (1)..(382): unsure at all n locations
tttggacggagggaaaaccccaaaggcggccaaggccccggcgccggcgccggttccggccccggggaacccaattggcttaacaacggcattcaacttgttgtcaaaaaaggccctggttcagaatggcctcgcaacccgcctgcacgagggctgcaagggccattgagcgcggccaangcgcagctgtgcatcctcgccgacgactgcaaacagcccgactacaagaagctgattgaggccctgtgcgccgagcagagcgtcaacctcattgccgtgncccgacccaagaacctgggccagtgggcangcctgtgcaagattgacagcgagggcgaagcgcgcaaggtggtcggctgctcgtgcgccgtggtcaccgact

SEQ ID NO: 965 - DNA, 401 bp, Chlorella vulgaris
cccacgcgtccggccgttcttgacgttactgcctcctgcacaccaacttaaacttgaaggctgtcggtctgataagcaccatgcaggctgtcgctgctcccacaaggcccgcggctttcaccgccgccaggaagccctctgcccgcccggcgactcgccttcacgcgctgaaggcagtagcccagcagcagcctgagagcgaggcacagtggaggctgcagcgccgctcacttgccagcctgctagctgctgcaccggcgctgctgcctgccagccgcgcgcttgccctactgcctgatgatgacgatgaggagctaattgagaaggcgaaggccggtcgcaaggctcggctcgcagcggagcgcgagacgcagcgggcttacgagcgtgctgctggctat

SEQ ID NO: 966 - DNA, 447 bp, Chlorella vulgaris
cacacgcgtccgctcaaggagatcaagaacgggcgcctggccatgctggcctttgccggctttgtggcgcagcacatcaccaccggcaccacccccctgacgaaccttgccgaccaccttgccgacccctgggcaaccaccgtgctctccaacgagcacgcccgcctgctctgagcgctgcgcccgctgcttgccggcttgtaggctgagctgctactttgtgtgccttggaggctgcggctgcgctcgaggcagtggagcagcagcagtaggcagctgacatttgagcatggccgctgctcgctcccctgccaccgaaagtctgtcgttgcaggtttttgctagctagcttgtaggtgtacgctttgcctcgcgctgctcggcggctggctttaacagaggccaggcgcacggcagccgtgggtatttggttctacatttcgtggg

SEQ ID NO: 967 - DNA, 435 bp, Chlorella vulgaris
ggggccacccaaacgtccgcaccttccttccttcctccatagtcacccttgcaacagctgcaagatgctgggcgtcgtacggagcgctgcacgccaggccaagcccgcactcagaggagtgcgacgcatgtccagcggcaacgttgactacgcgcttgaggctaaggaggctagcaagtggaaggtggtgagcttcgcggctctgccaatcattgtaggcatgaccatttatgacttcgccggatcccacccccactttgaggagaaccccgcctacccttacatgcgcatccgcaacaaggaattcccttggggcgacgagaacctgtttgtgacgaagaagaagcactaaggtggacctgggcaccccagacgtagcagcaaggccaaggcagccggtggcgcctgtgggccgcctacctctagacagtgggt

SEQ ID NO: 968 - DNA, 401 bp, Chlorella vulgaris
ccggggtcacccacacgtccgaacacgcgtccgcggacgcgtgggtacctgggcaacccctccctcatccacgcacagtccatcgtggccgtgctgctctcccagattgtgctgatgggcctggttgagggctaccgcgtgaacggcggccccgctggcgagggccttgacgccctgtaccccggcgaggcctttgaccccctgggcctggccgacgaccccgacagcttcgcggagctcaaggttaaggagatcaagaacggccgcctggccatggtgtccatgcttggctttggcgtgcagggcctgctcaccggcaagggccccctggagaacctggctgaccaccttgttgaccccagcgtgaacaacggctttgccgtggccaccaagttcacccc

SEQ ID NO: 969 - DNA, 59 bp, Chlorella vulgaris
cgtccgcaaaagcgtacgacaaaacttaccgagtcgcaatcaagcgtcagcaatgaaag

SEQ ID NO: 970 - DNA, 445 bp, Chlorella vulgaris
cttccgagagtggagtaacaagtgagtagttaaaaggatgctgccatagattttgtgttgaccgtaagcggcagccgtgcttactttccttgatgatacacagctctgagtgtcttgcagtggggtgagggctgcgataggggtagggattggtgttgtgggtcgatggagggaagccctcctgcttcaactaggtgggccggtgcgtgagcgttgaattgcctcagcaatgcccgcattttcgaaactgcagcaatgcctgcacttgctttgctcttcacttattgtgggcaagtgtgcttaaaacagcaaactgtgtatcttatggcggggaccttggttcgagcagcaagcgcagctctgtcagtgctcccctgggtcaaatgttggtgcctcaatatcggccggagactgtgcgttgcctgtatccccgtgggtgctgcca

SEQ ID NO: 971 - DNA, 435 bp, Chlorella vulgaris
cccaagcgtccgaacggcttgggtcggtggaggaggtgctgcagcaggcagacgtggtcagccttcattgcaacctcgatgacaccacccgccacctcatcaactccaagcgcctcgccctgatgaagcccgacgcggtgctggtcaacgcggcgcgcggccccgtcatcgatgagtcagccttagtcgcacacctccaggcgcaccccgccttccgggtggggctggacgtgtttgaggacgagcccctcatgaagccgggcctggcggagtgcgagaacgcggtggtggtgccgcatatcgcgtcagccaccgagtggacacgcagcggcatggccacattagcggcggccaacgtggcggccatcctgcaaggctacccggcgtggaacaagcctgatgtgctgccctttgtagacgggccctttgggcaga

SEQ ID NO: 972 - DNA, 423 bp, Chlorella vulgaris
cgtccggcctgaacgtggaagacgtttcttggctggtgccaagggccatgcgcctgtggcggcatgagcgggtgtaaccgtaagaggctcagccagcctgagaaccttagttgtgagtgcctggattgggtgttcggaactttgcacttggccattccgcttctgctgacatgcttgcatctgctttccttgtggctgtatgcgctgcgtttaccacttctattgtcatagatggaagttgagccgacaaggtggatcgtaaagataaaggaaggtctctgctgctctgggtggtgctcaaccaggggcttgcaggaattcatgctgttggtgtttagcagctgtcgtgctcgtgttttcccctcccgccggcctagcagcattgtggtagaagaactgtgtaggcctctttccctgctgggc

SEQ ID NO: 973 - DNA, 457 bp, Chlorella vulgaris
gttccgggtccacccacacgtccgaggagaagatcattgctgatgcccgcgccgcggcccagaagaagatcactgatgccaagaacgctgtgtctgccgaggcggccaaggacctggcggcagccaaggcgaaggtggatgctgagctgaacaaggccctggagcagctggaggctgagaaggccgccgcgttcaagtcccttgactcccaggtggagaagctgtcagctgacatcctcgcccgcgtgcttcccgagggcgtcaaggtttagtcagcccacccatcctggtgaatgtagtggaaggctggcctacctaggcctgcttagttcccccagcccgacagtgcgggctctggcttcaaagggcaaggtcccctcagtgtgtggctggtttggtccataagaaaggcactggaggacaagagtttggtccgttaatgggctaatgggtgtgt

SEQ ID NO: 974 - DNA, 307 bp, Chlorella vulgaris
cccacacgtccgcacgtgcacaccctgctggacgcagtcaacgacttcgctgaggtgcccgagcgcatgaccgacgcgcccctgcgcctgcccatctccggcatctagaagatcaagggtgtgggtaatgtgctggccggccgcgtgcagcagggcattatgcagcccggtgacgaggttacccgcctgctgattcacaagtgggcaatccgtcgtatcggcaaggtctccaccttcgtcacgatgccctcacagttggatctggccagacttggtgacgacttcagcgtaatggtctccgacctgc

SEQ ID NO: 975 - DNA, 371 bp, Chlorella vulgaris
  unsure (1)..(371): unsure at all n locations
cggacaaacaatgcagattttcttgcagacatacacgactcatgtccttgagcttagctccgatgccactgtagccgatgtcaaggctgccatcgaggctagccagtgcatcccctgcgatgcgcatcgtgtgatgttctctggtcgccagctggaggaggaggcctccctggccgcctgcggcgtgtctgacgacagccagctgtacatcctgatgcgcctgctgggtggtgccaagaaacgcaagaggaagacctacaccaagcccaagaagcagaagcacaagcacaagaagatcaagctcagggtgctcaagttctacaaggtanacgacagcggcaaggtgcagcgcctgcgcaaggtttgccccc

SEQ ID NO: 976 - DNA, 308 bp, Chlorella vulgaris
  unsure (1)..(308): unsure at all n locations
aacaacccagacaccttccctaaccccaaggccaaggaattcaaaaacggccccttgccaagggggtcaagccttggctttgccttcaagggcttgctcaccggcaagggccccctgaaaaacctgcctgaccacctgcctgacccaaccttgaacaacggctttgccgtggcaacaaatttcacccccggcaactgagctggttgtcttgacggacgtttggctgtgctgcttgacangctggaggtcagcattactatgctggccttgtcttgagaagaaaatccttgtgtaactagctaaccatc

SEQ ID NO: 977 - DNA, 376 bp, Chlorella vulgaris
  unsure (1)..(376): unsure at all n locations
gtccgcgatcacaagctttgcagatggctaccgctttggcctgggcgcggaggtggggatcagtacggccaggatccatgcccgggggcctgtgggtgtggaggggctgctgaccacccggtggctcatgcggggcacggggcagacagtggagaaggacaagggggtggcctacacccacaagccgctgccgctgcactagggagagggggagactggggcgggagagatagcaagacgtgcgggtgtgtgagagacgggggagagagcgagcactttgcatctttttgagttgacgcggagggctgcttgtgtcaccgtgaaccgctgtggattgcacgctctgagtgtgcagcccngtggtggcgtgcctgtg

SEQ ID NO: 978 - DNA, 441 bp, Chlorella vulgaris
acccaaacgtccgcccacgcgtccgcccacgcgtccggcgcatccagaggcagaagcgtgtgctcaaccagcgtctcaaggtgccccccgcactgaaccgcttcacccgcacgctggacaagaacatggccgagagcctgttcaagctgctgctcaagtaccgccccgaggacaaggcagccaagaagcagcggctgctggctgaggccgaggcccgtaccgccggcaaggaggtggagaagaagaagcccgtggtggtcaagtttgggctgaaccacatcaccacgctggtggagcagggcaaggcgcagctggtggtcatcgcgcacgacgtggaccccatcgagattgtggtctggctgcccgcgctgtgcaagaagatgggcgtgccctacgtcatcgtcaagggcaaggcccgcctgggcaccgtcgtgcacaaga

SEQ ID NO: 979 - DNA, 422 bp, Chlorella vulgaris
acccaaacgtccgcgcacgcgtccgcggacgcgtggggggctgtgagcagcaggggggctgccacaatgaaacagctagtctcttcccgcaccatcgacatcccttcgggggtggagattgaagtcaaggcgcgtaaggtccgcgtcaagggccctcgtggcaccctgacccgcgacttcaagcacctggcggtggacatgttcctgtccgaggaggagggcgtgaagaagcttaacgtggactgccactttggcaagcgcaaaagcctggcagctatccgcacagccacctcccacgtgcagaacctgatcactggcgtgaccaagggctacgagtacaatatgcgcctggtgtatgcccatttccccatcaacatcaacatcgaggatggaggcaaggtcatcgagattcgcaacttcct

SEQ ID NO: 980 - DNA, 375 bp, Chlorella vulgaris
ttcccggggtcgaccacgacgtccggagtccctgtccctgtctaccagggtaacccatcaacagggattgaaggccaagaacaatggtcaggcacaacaacgtggtgcccaatcagcacttcaggaagaagtggcatgacagagtcaggagctggttcaaccagcccgctcgcaagctccggaggaggaatgcccgcgccgagaatgccaataaggtgttcccccgcaccaccgcgggcacactgatgcccatcatgcacggctagaccgtcacgtataccatgaagaagcgcgcgggccgcggcttcacgctggaggagctcaaggaggctggcattccgtctaagcttgcccccaccattggcattgcactgg

SEQ ID NO: 981 - DNA, 187 bp, Chlorella vulgaris
cgtccgaaatagattaaaaagaaaaaaaagagagtaataaaaaaaaaaggataagatggataaaaaaaaaagtaaggcaatgtataaatgattcgaaatcattacggggtgaggcattgcagtgaaagagtgtggtagtttgtttcagaggctcgcttgcatgatcggtatgatgaatggtggcact

SEQ ID NO: 982 - DNA, 343 bp, Chlorella vulgaris
cacacgtccgaacacgcgtccggcgcattggaggcatctagggatctggcactgatataggccctgctcaagtccggccagctggaggggcggctggtctaagtgcaccaggttgccagccatggggaagtcttgtgaagcaaatatcagaaggtaattccttaagattgctggccataggttttgaaggagcactgtgccccctttggaattcttatggagcaatgcatctggtcaactgttgtcagacaacgtgcccgccatgttgatctgccactgtcatgttccccaacaaactatatgaggatctatagaatcaagcttcagcacctacagtatcaca

SEQ ID NO: 983 - DNA, 138 bp, Chlorella vulgaris
tgacaaactctctgatgatgcaagggcgcaacaacggcatgaagctgatggcggtacgcatcgtctagcacacctttgacatcatcaacctgctcaccgaccaggaaccccatccaggtcctggtggaagccttcatc

SEQ ID NO: 984 - DNA, 205 bp, Chlorella vulgaris
ccggagctgaagactggggccttggggttccctgcctgcccacccttgctggctgccttaaaccctttccgccccggcaagtaaccctgtgcgggcaatgctgttgtggcgctgtgttgaggggtgggctgtgattgccgcgggagggcaggcctagccgcgtgcagggggtccaagggaccttgatcgccgcggttggcatctg

SEQ ID NO: 985 - DNA, 426 bp, Chlorella vulgaris
agcaaggggcggctgcggcgcgctgctaccaccggccagggtgctggaggaggtgccccgagtcttcacgctgcagcttggctggcctagccagcatgaaccgcctggcgccatctcagcactgctggcggccgtggaggaccgggtggacctggcctccctgtacgaggggctgctgcctggccagcacttgcaccgcctgcgcagcctggccggcagctgcagcggcggccccagccgctgggcctgcttcctgctgctgccggccgagggatgggtgctgctggacgggtccagggcgacccatgtgggtgcttgggccgacgtgcaggctgcctgcgccgccttccgcatccagcccgaggtgctgctgtatgaggcgggccagcagtagtggaggtgacgtgtggggcttgggggttggtg

SEQ ID NO: 986 - DNA, 447 bp, Chlorella vulgaris
accacgcgtccggcgcagtggaggcatctagggatctggcactgatagaggccctgctcaagtccggccagctggaggggcggctggtcgaagtgcagcaggttgccagccatggggaagtcttgtgaagcagatctcataaggtaattccttaagagtgctggccagaagttttgaaggagcagtgtgccccctttggaattcttatggaccaaggcgtctggtcaaatgttgtcagacagcgtgcccgccatgttgatctgccactgtgaggttccctaacaaactacatgaggatccatagaagcaagcttcagcacctacagaatcacagacaagtcgcgccttcctctcactgcagtgccaagagtgtgacctgccaccggtgggcagcttcccacggtctcgcagccgaggtgtacgatagttgattcaattacctcaacc

SEQ ID NO: 987 - DNA, 419 bp, Chlorella vulgaris
  unsure (1)..(419): unsure at all n locations
taggagggcttgccggcccaaaggaaaacccccccctggaatggaaaattaagtccccctcccaaggcggtgaaaacctaaggcatcaaaaccccgggccaaaaaatccgccaagcaggctgttcccttggtagcgtttgtatacaactgcactacttgccagtgggacaatgccttggggtggcacacatcaggcgcttggacagctgcccactgcttgcctaggctggctgtgtcacagcaagatagggtgtttcttcacggtggcaggcagctgttgaaccccactgatgtggatggttatccaagctgagcgcccttgtaacttgctgattgccttacgagtgtcgtttgcgattttgtggatcttgtcggttcactgtgtcacacanacagcgcatgcactcaagaagcccaaa

SEQ ID NO: 988 - DNA, 414 bp, Chlorella vulgaris
caccacgcgtccgcccacgcgtccgaatacagaagcaatcatggcggacgcaggggagcacaaaaagaggacgttccgcaagtacacctaccgtggtgtggacctcgaccagctgctggacctcagcactgacgagctaatcgagctcttccccgctcgtcagcgccgcaggttccagcgcggcctgaagcgcaaggccctggccctgatcaagaagctgcgcaaggccaagaaggaggcgcccgctggcgagaagcccgagccggtgcgcacccacctgcgcaacatgatcatcatccccgagatgatcggctccgtcgtcggcgtgtacaacggcaagaccttcaaccaggttgagatcaagcctgacatggttggcacctacttggctgagtactccatctcctacaagcc

SEQ ID NO: 989 - DNA, 421 bp, Chlorella vulgaris
ccgggtccacccacaacgtccgcccacgcgtccgcccacgcgtccgggagctgttcatcgcccccgagggtgtgttctctggccagtacatctactgcggcaagaaggccaccctgaccattggcaatgtgaagcccgtgggcgacatgcccgagggtaccatcgtgtgcaacgtggaggagaaggctggcgaccgcggctcactggcccgctgctctggcgactacgccatcattgtggcgcacaaccctgatgccggcatcacccgcattaagctgccctcgggcgccaagaaggtgatcagcagcgagtgccgtgggaccgtgggccaggtgtctggcggctgccgtatcgagaagcccatgctcaaagccggccgcagctaccacaagtaccgcctcaagcgcaacagctggcccaa

SEQ ID NO: 990 - DNA, 179 bp, Chlorella vulgaris
ccgaagacgcctcccatcgattctgggcacactttcctctcgctcttcccttgttacgggtcatgctctgaaggcctctctgtctgccggccctatggctatcaaggctgcgctgaagtcttttgctgtctaccatatcgagatcgatttcttcgacctgaactacctgtagaacaccc

SEQ ID NO: 991 - DNA, 469 bp, Chlorella vulgaris
tccggggtcacccacgacgtccgactgcttgtgtgcgtagcctcagcagacatgcagacctccatgctgaagcctgcttccagccgggtggccttccagcaggccccccgccccgccagcgctgctcgccgcgtggtaacgtgcaatgcccagggcgtgagcgccttcaggaacttcgtggagaaggccgggaacgctgctgcagtgctggctgcgaccgccctggtggccggctccgccaacgccttgacctttgatcagctgcaaagcctgtcgtacaaggaggttaagggcaccggcgttgccaatacttgccctaccattgagggtggctctaccaaccccaaggagctgaaggctggcacctacaagctggcaaacttctgcatggagccgaccaccatcaccgtcaaggaggagtcgcagttcaagggcggcgagactgacttcgttgccaccaagctgatga

SEQ ID NO: 992 - DNA, 444 bp, Chlorella vulgaris
caggacgcgtgggcggacgcgtgggcggacgcgtgggcggacgcgtgggcggacgcgtgggtttcacccagcccaggatggcagctcctctactgccagtcaccacgacgctctgggacatggaatacagcattcatgaatgcccccgccggcaccaggagtatgtggctgccatcttccctggcacatcaatagaaggtatgttagtcataccaacctgccagcatgccacgctggacttggtgcagcgcggcgagaaggtagaggcagagaaggatcgcttactggagcggttcatgtcgtttgcaaaacccatttgtgaaaagctggaagcggctggctactgggcagactacattgacccctgcagcgggctacctatgatacataaggagacagggtcggtgtatggcgaggtggaggctctcatcaccctgctcggct

SEQ ID NO: 993 - DNA, 290 bp, Chlorella vulgaris
cggggtcacccacacgtccggaagcggtggctcttggcggcggtgtgctggtgttgcggctgccttacctgcctttagaatctatgtgttctgacgttgaaacctgtagaacatgctgtcagtgggcctgttgtgaccacgttggccacgcctccaccttgcggacggagcgcgccgcctgccaagatgtcggcctacatgccgctcacacgacatgtcgtatctgctataacgccattgtcatgcccgacagtgactgtccgttggcaaaggaggcagcggcagcagtg

SEQ ID NO: 994 - DNA, 444 bp, Chlorella vulgaris
  unsure (1)..(444): unsure at all n locations
ccaggcgtccgaacacatgcaggtaccccgcaagctgtacagctggcaagagatgaggtgtggcacaagagtgagcttactttgccagcagcgcgggcttgaaggcatggctggagagctggcattacaaggagatgcctcgggacctctgactgacacttgtcgacttgagggttggagggctggtcaactcggcaggggtcgacagtgcagctgcacgtgccagggcacctcttgcttgtagcacagtacttttggtccacatagcatctagtatgggtggcaggtagtgcgaacagagtagaacgagggtgcagctagacgagggctgtgctgaatgtagtccacctagcattctttggtctcattcctaccgcacgccgcatgccctgctcnatgatagaatgcattcattcaacatgccgtaattcggaatcttcgccc

SEQ ID NO: 995 - DNA, 434 bp, Chlorella vulgaris
gtccgcacacgcgtacgcggttctcgacccggtctggtcctgctggtgaacagtgcacaatgccgtctgccaccaagctcgtcaagaaggaggcgtaggacgccaagctgtgcgagctgctggacacccacaccaaggtgttcctagtccatgccgacaatgtgggctccaagcagttcatggatatccgtgcggccatccgcggacactccaagattttgatgggcaagaacacgctgctgcgccgctgcatccgcctatactgcgagcgcaccggcaacgaccactggctgggcctgctggactacctggtcggcaatgtcggcctggtcttcacccaaggcgacctcaatgaggtgcgcacgcaaatcggtgagttcaagggtggcgcccccgcccgcgtgggcctggtggcccccaacgacgttgacatc

SEQ ID NO: 996 - DNA, 117 bp, Chlorella vulgaris
ccgcaaagcgatacgccaatatgggcgccagccacacccctggagcgtggcgattgagtagctcaggcaatggtcttgcctcgctggctggggaggtaggctctttacagctggctg

SEQ ID NO: 997 - DNA, 274 bp, Chlorella vulgaris
ccggggtcacccacgcgtccgaagacgcgtgggaaaaaaaaaaaaaaaaaaaaaaaaaaaaaaaaaaaaaaaaaaaaaaaaaaaaaaaaaaataaaaaaaaataataaaaaaaaaaataaaaaaaaataatggaagttaaaggttttaaagttggaccttggaagggtcttttttgccttttggttaggaaaagggctttaggcctcttattttgcgtggggggtttttccacccctttcagttttggccttttttttcatccccttttttttt

SEQ ID NO: 998 - DNA, 243 bp, Chlorella vulgaris
cccacacgtccgaagacgcgtgggttcgctgacagtgtttcgctcctcactaacatccagccgccaaaatgcagagcttcgctgtcaagcccaccctactgcgcggcgcagcccgccccaggctggttgtgagggccgaggaggctgctaccgctgcgccagccacgatgcccgacattggtccgaatcgcggctccactgtccgtactttgcgctccgagtcgcactggtccatggagaccg

SEQ ID NO: 999 - DNA, 431 bp, Chlorella vulgaris
accacgcgtccgggacggtggtcgcagcaggggttgtcagcatggggtctttggtggccaacgagaacttcacgcacatcctgcgtgtgctgaacaccaacgtcgatggcaagcagaagattatgtacgccctgactgccatcaggggtattggtcgccgcttctcaaacatctgctgcaagaaggcggaggttgacctgaacaagagggctggtgagctgagccccgaggagctggagagcatcatgaccattgtggccaaaccccgcgcctacaaagtgcccgactggttcctcaataggcagaaggacatccgcgacggccgcttcagccagacgacctcctccgccctggacaccaagctgcgcgatgatttggagcggcttaagaagatcaggaaccaccgcggtttgcgtcactactggggcctg

SEQ ID NO: 1000 - DNA, 446 bp, Chlorella vulgaris
cacacgcgtccgcccacgcgtccgtagcacaggtcggcgttccttcccctgtgactggaagtcccgcatccttcccctgtgctgaagtgatcaacgcgcaatggcgaagcacttcaccgtccttgcccttctgttcgttgttgggatagcagccgcacagagcgactgcccaaacggcttcacggggccagagtgcgctttgtgcaccagcgatgctggctgtgctgacttgacaggctacgctgacgccacctgcaacacagacctgagcttcagcgctaactcagagctcaagaacttccactgcaccatcgagagcagcaccttctcggccttcatcgtgcccgactccctcctcatccagtgctacccccagggcatgaacatgaccatggactccgtggcggacgcgcccggcgggcccttctgcaccctcagcatgaccc

SEQ ID NO: 1001 - DNA, 428 bp, Chlorella vulgaris
gcttgttcggtcttgatcgctgacccgcctgcttgctcgcccttcaaacgatcatggtgcacgaaattgccgacaagagcgcttgggatgcgaaactggatgaggccaaggctgcaggaaagatagtggtagtggacttcacagcggtgtggtgcggtccctgccgaatgatcggcccagagtttgagaagcttagccacgaccctgagtttgccaacctcatctttctgaaggtggacgttgacaaagtggagtctgtggcccagcaatgcaacatcaaggccatgcctaccttcatcgtgttcaaggacggcaagcctgtggaggagattgtgggcgcatccaaggacaagctccttgccctgctcaagaaggcggcggctggcgggcctttcactgcctgagtcataagagttctgagcccgcct

SEQ ID NO: 1002 - DNA, 448 bp, Chlorella vulgaris
  unsure (1)..(448): unsure at all n locations
cgtccgcacacgcgtccgataaaatctgctgcctcaagttgggggttgcaagggttcgttcctcgtcacgtgcctcatcgtgctgccaccatgccactggacttgagcgagattccagtggaggagctggtgcacgaggtgcagcggcgcctggagtgcctgtccaaaccggagaagcgtcttatcctcataggcccccctggctgtgggaaggggacccagtctccaatgatcaagaacgagaactgcctatgccacctggccacgggtgacatgctccgcgccgcagtcgctgccaagactccgttgggcctgnaggtgggtaaaacagccaacgatggtcaccttccangtgggctgtggaggggggatccctgccaagccttgtacagggaggcaccccangctagccaacgtcacaagcaccttgtgattctagagtgccatg

SEQ ID NO: 1003 - DNA, 401 bp, Chlorella vulgaris
ccacccacgcgtccggagagaggcacgccgagcgccagcgcaagctggatgagctggcagagcggcaaccggcaaccccgaaacccaagatcgaaggcaaaaatcccccaaaaaaagaaggcgcttgcctgccgcgccccgccgccggccgccccaaagcgcccggcggcaagtttgtgccgcgccacctgcgcgcaggaagtggtgggggttctgcggagcggcctgcggagcgtgagccggctcgagagcctgcacctgccgcgggtggcccgccccgcgaccgctcgccgcagcgagacgagcgtccgggcggagcgtggcggccgagtcgcggcgctgagcgcgacgacgaccgcgacagggcgcccgcgccttctggcggaagcgcctggcggccc

SEQ ID NO: 1004 - DNA, 362 bp, Chlorella vulgaris
tccgaacctgccgtgccatcagcatctggtcccgcagcagcaggcggtgcagcgggacagcaaggcaggacagcccagccagcctccaggccacctgcccctggcaacatcagggggtttggggacctagggggcggagaggacagggaggaagaagaggaggatgaggacaacgagtactatgcaggcggggcgaagagtggggtggcggtccgaggcggtccaagggaaggcagccgggaccatgttgcacacctgtttgaccaggccagacgggcatgcgcacaggaggctagaccagaataccttgatggtccaggaggctcaggctttacggccttttccggcggtgcacgcacact

SEQ ID NO: 1005 - DNA, 414 bp, Chlorella vulgaris
cccacgcgtccggaatccggcaaggaagcacgatgccgatccagggcgggcacaagtaccaccagtatcaggtggtgggacgccaccttcccacggagagggagccggagcctaccgtgtaccgcatgaagctctgggccagcgaccctgtcagggccaagagcaagttctggtacttcctgaggaagctgcgccgggtcaagaaggccaatggccagatcctggcatgcaacgagatctttgagaagcaccctaccacggtgaagaactacggcatctgggtgcggtaccagtcgcggactgggtaccacaatgcgtacatggagtaccgcgacaccaccctcaacggcgccgtgtcccagcctgtatcaggagatggcctcccgccaccgggtgcgccaccagtcgatccag

SEQ ID NO: 1006 - DNA, 364 bp, Chlorella vulgaris
ccacgcgtccggatcatcgagggctggaactcgcgtgccaaggtcggcgccgacctgaccgtgcagaagctctgaagctccacggtgcctgtgttgggtcagggggcctgggagccccattcctaggtttgggtggggttagggggcctgacggtacagaagctagcttggtggggccgctgctcctgctcggttcgcgtttccctacctggggccgctcagtcacgtttgaggtgagacttgtcaggtttctagtccacagcccacgcgagtttatgttactgtgtcgatggtatgtggccgtggtggcctcgtggcaagcattgtgatgtagccagggtaggccccactggggtttcccggg

SEQ ID NO: 1007 - DNA, 433 bp, Chlorella vulgaris
cagcaagcccgcttgacggcctttggcgcccagctgcaggttcgcaagatcctggtgaggcccctgccagcgggcagggtgcctgtcaggcaggctgccttttgctcagcccaagcttctagcacacgacggcaggccctccagctaggcacgctgcttgcagcagctcccttgctgccgccagctgcatctgctgccaaagcgcccagggggttcgtgccggtcaaggacacgcaggatggctacgagttcctgtaccctttcggctggcaggagattgcaatcgacgggcaggatgtggtgttcaaggatgtgatagagccgctagagtcggtcagcgtgaatctgctgccgacagacaagaccgacatcagcgagtatgggccgctggatgacgtggtgctgacgctggctgacaaggtgctgactggtc

SEQ ID NO: 1008 - DNA, 445 bp, Chlorella vulgaris
  unsure (1)..(445): unsure at all n locations
cacccaggcgtccgcacacgcgtacgcccacgcgtccgacagtaccgcgggcacccagggcgggaacggtactgccgtcgagggcggcaacggcaaggatgctgcccagctggctgcgcctgccgtggtggtcctcacgctggcggtggtactggtggaggtactgctcaacttctgctaggcgccctggtgggaagccccaccggtgggcaccggatgaggtacctctcgctggcaatactagcggtggaggtactgcccgactcccgcttagcgctggtgccaggggccatatgaacaggcctgtgccatggcactgtccctgccctgacccttgctctggcctgggagtggctggcctagacctaggaaggacgttggggtgttgctgctgcagccggtgggtccacagctggtggcctcattgtangcattgcagccactg

SEQ ID NO: 1009 - DNA, 257 bp, Chlorella vulgaris
cccacacgtccggagacgcaggcgttgaaggaggcccagcagtgcaagcgacgcacagccctccggtgcagcgtaacaggacgattagcatgccaacatgcttcgggcgcggcacgtggaggctgagcttgcccccgtctgggtaaatggaatcctgaaggtgccgcatggggctgtaccacatcctgaacaacatcgatgatacataggctgacaacaagctcatattggagcggacctgtgctacggttgttctt

SEQ ID NO: 1010 - DNA, 441 bp, Chlorella vulgaris
ctcgtggaatcccccgtcgacaacaggtccaaggttcacaagatgcagaccctctctgcccgtttcggcgtccgcgcccctgtctcccggggcacccgccaggtgacccgcgcctccgtggagtggtacggccccgaccgcgccaagttcctgggccccttcaccaaccccccttcctacctgaagggtgagttcgctggcgactacggctgggacacctctggcctgtccgccgatcccgagaccttctcccgctacagggaggttgaggtgatccatgcccggtgggccatgcttggcgcccttggctgcgtcgtgcccgagctgctggaccgcaacggcaccgtcaactttggcgagaacgccgtgtggttcaaggccggtgccgccatcttcggcgatgacgggctgaactacctgggcaaccctccctcatcacgc

SEQ ID NO: 1011 - DNA, 449 bp, Chlorella vulgaris
acttgttgctggcgtcggagcggctggcaacatggcgaccgagattaagttgttcggcaagtggagcttcgatgaggtggaggtgaacgacatctcccttgaggactacattgccgtgaagcccaagtatgcgcgcttcaccccccactctgccggccgtttccagaagcgccgcttcaggaaggcgcagtgccccattgtcgagaggctgaccaactctctgatgatgcacgggcgcaacaacggcaagaagctgatggcggtacgcatcgtcaagcacacctttgacatcatcaacctgctcaccgaccagaaccccatccaggtcctggtggacgccatcatcaacggtggtccgcgtgaggatgccacccgcattggctccgccggtgtggtgcgccgccaggctgttgatgtgtcgccgctgcggcgcgtgaaccaagccatct

SEQ ID NO: 1012 - DNA, 430 bp, Chlorella vulgaris
tctgcaccatggcgtttgcgatgaagtctcaggtcagcgtgcagaaggcttccttcgcgaagccggccctcaaggcctcctgctccaagcgggtggcagtggctcgccccgtgagctgctctgctcagaatgagaaggccaccgccgtggctgccgccgctctggccgttgcccttggctttggccaggttgacgctgcctatgccgacgttgcaggcctgaccccatgcgcggagagcaaggccttcgccaagcgcgagaagaatgaggtcaagctgctgacaaagcgcttgaagcagtatgaggccgactctgcgcccgccctggccctccaagccaccattgacaaaacccatgcccgctttgagaagtacgccaagcacggcctgctgtgcggcactgacggcctgccccacctcattgcggaccc

SEQ ID NO: 1013 - DNA, 418 bp, Chlorella vulgaris
ccacgcgtccgcagggagggagggcatcctccggggagtctgagatttaggaaaacgagctgtgcgggcgggagagtgcctgcgtggagaagcttggactccccctggtatccctgggtgacgcgacacgtcgcattgtggtttgattgcgatacacgagtggtagcgtggcccttgaaacctcaagtgcaggaaccatcatggccacatgtctaacatcgccagccttcgcagttggcaggttgacaggccggcagcagtgcaggagaccgtccagttggacaccggcttaccttcccagccttcaccagacgaagaggttaatttgcaagacgggcacagagccgaactccacggaagacaagcagtcaacgaacgcccctgccacgcaagccaacaagccagcttctcccgcccc

SEQ ID NO: 1014 - DNA, 325 bp, Chlorella vulgaris
gcaatagttccagggcaatcactatgcaggcaaccatgatgaagaccttcggcgccagcctgcgcaaggctgtgccaacccagggcaagggcacccgcaagttgacccgcgcctccttggattggtacggccctgacagggccaatttcctgggccccttctctgagggctccacccccagctacctgaagggcgagttcgccggcgactacggctgggacactgctggtctgtctgccgatccccaaaccttcgctgcctaccgcgaagttgaggtcatccatgcccgctgggccatgctttgcgccctgggctgcctgacccc

SEQ ID NO: 1015 - DNA, 430 bp, Chlorella vulgaris
gaaacatggcacccaagaagaaggttgcggcccctcctgccgcggtcaggaaggccgctcagccggccaagcccgtgaaccccctgtatgagaagaggccgaagaccttcggtatcggtggtgccctgccacccaagaccgaccttcaccgctttgtgaagtggcccaagtatgtgcgcatccagaggcagaagcgtgtgctcaaccagcgtctcaaggtgccccccgcactgaaccgcttcacccgcacgctggacaagaacatggccgagagcctgttcaagctgctgctcaagtaccgccccgaggacaaggcagccaagaagcagcggctgctggctgaggccgaggcccgtaccgccggcaaggaggtggagaagaagaagcccgtggtggtcaagtttgggctgaacccacatcacacgctggt

SEQ ID NO: 1016 - DNA, 327 bp, Chlorella vulgaris
acccaaacgtccgcacacgcgtccggccgtgccccagtctaggtgtccctgtctggctctgcacccggggcaacctgctaaacctatagcacaaggccggcgggctcttatcttccttggtgcaagcatggcagcagcacgggtgcagcagctgttgagcaagaccaaggcggccattgagcccgcataccaggcggcaagaggccaggttgtcaagacgtatgagtcacaaatggccaagggcgcagaatactttgtcaaggacccagcagcagcagacaagcttctgaaccagtggttttacacacatctttctcggatacccac

SEQ ID NO: 1017 - DNA, 389 bp, Chlorella vulgaris
ctgtgccaggctttaagcaggggttgacttgagatgatgggggattgggtttcccacattggtgcagtaagtgttcatagtattgccagatggcttttgtagagtgatttaccagtgtgatgctcccctggtaaacatgttttgctgcaggttggcgtactggcatgacattggcctagcacttctgtttacatgtgtctgtgttggtgtaacttgtgagcttgtggggtgactatcgccgtcttataatggtaaagatgaatacacttcccggcagtgggtgccgctagtggtccctgtataccatgtgaccttacttggtaattcccatcatctgtaattgctagcatgtggcacctggtggcagtgccgttcttgtaaccatatac

SEQ ID NO: 1018 - DNA, 318 bp, Chlorella vulgaris
gccagtcgggccaggcggaggggttcagctatagcaaggccaacaaggagaaggcggtgcactggaatgaggagacgctgtatgagtacctgctgaaccccaagaagtacatcccaggcaccaagatggtgtttgctggcctgaagaagcccgaggagcgcgctgatctcatcgcttacatgaaggaggcgtgcaagtagatagcctagtagctgaactaccatagcccaggacatatgggcgtacctcaaagacgcgactgccaagtagacggcggcccgacgccgccgtgctgccgctgtcgcagcacgctgcgct

SEQ ID NO: 1019 - DNA, 421 bp, Chlorella vulgaris
agtatctcacggcgatccagctgacgagccagcacctgctgaggtacctggcggtggctgtggtgatcaacaagcggcggcgcaacgtggtgaaggacctgatcaaagtgatcagccaggagcggtacgagtaccgcgaccccatcaccgacttcctgtactgcctctttgtcgactttgacttccagggggcccaggacaagctggcgctctgtgaggaggtgctggactcggactttttcctggtgaatgccaaggaagctttcatggagaatgcccgccagttcctgttcgagacctactgccgcatccaccagtccattggcacccactcgctggctgagaggctgggcatggatgacgagtccacagagctgtggattgtgaaccttattcgcggcgcgcggctcaacgccaagat

SEQ ID NO: 1020 - DNA, 388 bp, Chlorella vulgaris
agcagccgtggtcaggtgacccaggtgcgcgtgaagttcctggatgaccagaaccgcctgatcatgcgcaacgtcaaggggcccgtgcgcgagggtgacatcctgaccctccttgagtctgagcgcgaggctcgtcgcctccggtaatgcgggaggagctgggggcgctggcgcaagatgtgacccctgcgcgcctggaacagcagtgtgtggatggcgtgcagcgtgtagcagcagcactggcagaggcgggctgggtgggcccctttgtgtgcagctgagacgtgttgagcgtttgcacgcggcaacgcagcagcagcaacagcagtgagatgtgggcgtgaagtagtgtaaggacgccacggcgcttgtaacaggctccagtgct

SEQ ID NO: 1021 - DNA, 247 bp, Chlorella vulgaris
gtcaaaaattcaagggtccgacgacgcgtccgaaaaatacagaaaagacggaagggttcaactaaagcaagggcatcaaagagaaggcggtgcactgagaataaagagacgctgtatgagtaactgctgaaccccaagaaatacatcccaggcaactatgatggcgtttgctggcctgaagaagcccaaagaggggggggctcccatgggggtacaagattgaggcctgcgggtagacaccctaata

SEQ ID NO: 1022 - DNA, 399 bp, Chlorella vulgaris
tgtgggcaagggggtctgctttgagaccggcggccttgacatcaagcccgcctccgccatgaagctcatgaagaaggacatggggggagctgcactgacgctagggctggctcatgccattatgaagacgcagctgccggtgaacctgcggttactgatacccgccgtggagaactccatctctggcaacgccttcaggccgctggatgtactccagacccgtgcggggatcacggttgagaacggcaacactgacgcggaggggcggctcatcctgtgtgatgccctggcagaggcggccacagagaagcctgacgtgctcatagacgcggccacgctgacaggcgccgccagggtggcacttggcaccgagctgcccgccctcttctgcaacaacga

SEQ ID NO: 1023 - DNA, 251 bp, Chlorella vulgaris
accaccgtccgcccacgcgtccgcccacgcgtccgcccacgcgtccgcggacgcgtgggggccaacatgcgcgcgaagtggaagaagaagaggatgaggcgtctgaagaggaagcggcggaggcagagggcaaagtgattgcacagccccgcctgcaagccagcggcctgcagccttggaggatgcagcagccagctgcgtgtgcgcccgatagtctgacagcgctctttaatgtaacatctgcgcgtcgc

SEQ ID NO: 1024 - DNA, 352 bp, Chlorella vulgaris
gtccacgggccgatccacgcgtccacggacgcgtgggcggacgcgtgggcgcctacgcttcagccgacgcctccgctgtggtcgtcacccagtcagtctatgccccggctgtctatgcagctgtgccttgagccttgcaatacttgcagttgcagctcacgtgagccgacatgaacacctatcaacctccaactggcacccagatatcggacaccgcctcaggccgtgtctggcagggagtagagttggaacggtggtttgtttgacgctaccttgcatttgctattattgttggtgccgctgtgtgtgtgcttttgtgaaccctggtaaggggggatgcatggcctctgga

SEQ ID NO: 1025 - DNA, 414 bp, Chlorella vulgaris
cccacgcgtccgcccacgcgtccggtgggctgtgagcagcaggggggctgccacaatgaaacagctagtctcttcccgcaccatcgacatcccttcgggggtggagattgaagtcaaggcgcgtaaggtccgcgtcaagggccctcgtggcaccctgacccgcgacttcaagcacctggcggtggacatgttcctgtccgaggaggagggcgtgaagaagcttaacgtggactgccactttggcaagcgcaaaagcctggcagctatccgcacagccacctcccacgtgcagaacctgatcactggcgtgaccaagggctacgagtacaagatgcgcctggtgtatgcccatttccccatcaacatcaacatcgaagatggaggcaaggtcatcgagatccgcaacttcctggg

SEQ ID NO: 1026 - DNA, 411 bp, Chlorella vulgaris
agacgagatgaagcacatgcttgtgcgcgtgggctggaagggcgactttgtggagaagtctgtgcccatcatccccatctccggctggatgggtgacaatctgatcaccaagtccaccaacatgagctggtggaccggcgtggatgtgaataacatgctcaacaagaagatccacgtgcacaccctgctggacgcactcaacgacttcgctgaggtgcccgagcgcaagaccgacgcgcccctgcgcctgcccatctccggcatctacaagatcaagggtgtgggtgatgtgctggccggccgcgtggagcagggcattgtcaagcccggtgacgaggttatcttcctgcccacccacaccgccgccaacccctgcatcggcaaggtcttcaccgtggagatgcaccacaa

SEQ ID NO: 1027 - DNA, 423 bp, Chlorella vulgaris
tagcggtctacggttcacgggtccatccacgcgtccacggacgcgtgggcgcgatcatgacgtccatagccgcaactgactcatcaacttcgaccgcatggacctgaccaacgacaagctgcgctcgctggtgcgcaagtggcagacgctgattgaggcgcacgtggacgtcaagaccaccgacggctacttcctgcgcctgttctgcatctccttcaccaagaagaggcccggccaggtgaagaagactgcgtacgcgcagagcagccagatccgccagatccgcaagaagatggttgacatcatgactcccgaggcgaccagctgcgacctgaaggagctggtgggcaagttcatccccgaggccatcggcaaggagattgagaagtcgtgccagggcatctacccgctgcagaacacctt

SEQ ID NO: 1028 - DNA, 345 bp, Chlorella vulgaris
acaggggtgaaacatggcacccaagaagaacgttgcggcccctcctgccgcggtcaggaaggccgctcagccggccaagcccgtgaaccccctgtatgagaagaggccgaagaccttcggtatcggtggtgccctgccacccaagaccgaccttcaccgctttgtgaagtggcccaagtatgtgcgcatccagaggcagaagcgtgtgctcaaccagcgtctcaaggtgccccccgcactgaaccgcttcacccgcacgctggacaagaacatggccgacagcctgttcaagctgctgctcaagtaccgccccgaggacaaagcagccaagaagcagcggctgct

SEQ ID NO: 1029 - DNA, 403 bp, Chlorella vulgaris
  unsure (1)..(403): unsure at all n locations
aactttggtcttgaagatgcggtgcatggctgcataccgtcagcccaacctcgacggtgacttgttcacggtggcaggccatgggagttaaagagggttcgaggggcatggtactgacgtggctggaagaagttgtgctctgggacttgtctgaagtgtggtgcaggacatctcctcttagctaagtccacttggagagcaggtggagatgatctggagcaggggcagtagagaacagggttaaggattgacttgcccacactgcttgtgcttgttgaggcgccacatataaacttggcgtcacatgtgtanggtttgagctggcaccacattccactgtgcttaatgacgcacaactccttgtcaagtacttaactccctcttcccctggagaacttccccc

SEQ ID NO: 1030 - DNA, 408 bp, Chlorella vulgaris
cggtcaagggtccacgggcccgtccgaccacgcgaccgcctcagcagacatgcagacctccatgctgaagcctgcttccagccgggtggccttccagcaggccccccgccccgccagcgctgctcgccgcgtggtaacgtgcaatgcccagggcgtgagcgccttcaggaacttcgtggagaaggccgggaacgctgctgcagtgctggctgcgaccgccctggtggccggctccgccaacgccttgacctttgatcagctgcaaagcctgtcgtacaaggaggttaagggcaccggcgttgccaatacttgccctaccattgagggtggctctaccaaccccaaggagctgaaggctggcaactacaagctggcaaacttctgcatggagccgaccaccatcaccgt

SEQ ID NO: 1031 - DNA, 376 bp, Chlorella vulgaris
accacgcgtccgcccacgcgtccggaacaagatggattctgacactgccggctacaagcaagagcgctacaaggagattgccgacgagatgaagcacatgcttgtgcgcgtgggctggaagggcgactttgtggagaagtctgtgcccatcatccccatctccggctggatgggtgacaatctgatcaccaagtccaccaacatgagctggtggaccggcgtggatgtgaataacatgctcaacaagaagatccacgtgcacaccctgctggacgcactcaacgacttcgctgaggtgcccgagcgcaagaccgacgcgcccctgcgcctgcccatctccggcatctacaagatcaagggtgtgggtgatgtgctg

SEQ ID NO: 1032 - DNA, 354 bp, Chlorella vulgaris
aaaaaaaataaaaaaaaaaaaaaaaaataaaaaaaaaaaaaaaagaaaaaaaaaaaaaaaaaaaaaaaaaatacaagaaagggggacaaaatggcatcggctggccgctctccaggtttcagttcgttggcacgctctttttagacagtatcttccgttctctgggtgtcctatctccttttaactgcctttctttttaaacctcgttgtctgccatgtccttatccttttacgccttctcccctttcccgcccttccccttttcgtcactgggcgtattacggtcgcagccttctcctttcgcactccttgcgctttgtgtggctctaccgcgaaatgggcttctccggtttg

SEQ ID NO: 1033 - DNA, 346 bp, Chlorella vulgaris
cttctgttagcgtcggaatagcgtcaggagtctgaattatgtctaacttgaaagctgtcgtggttggtgggacgggagccgtcggaagagagatagtgggacagctgcttgccagcccacactggtcccaggtgactaccgtggggcgcagagaagtggaggtaccctcgcagtaccatggctatgattcctccaaactcaagcagatagtggtcaacatggatcggctagaggaggagggacagcaggccttccagggggctgactcagttttctgcgcccttggaacaacccgccctacagctggcagtgcggcggcattcaggaaggtggacctccactatgt

SEQ ID NO: 1034 - DNA, 393 bp, Chlorella vulgaris
cccacgcgtccgcccacgcgtccgcccacgcgtccgcggacgcgtgggcgctgactgcatccgcacgcgtgtcttgtctcccagctctgcaccatggccgtcgcaatgatgtcctccctgtctcagcgcaacggcctggttgccaaggtgcagaagcagaccggcgttagggctgttgctcgcaccaggaccgtcacaaaggccatcagcgacgttaacctgattgtgggcggttccaccattggcgccctgattttgggcaggagcctgctgcctgtgcaccgcgcataccttgccaaggctggcctgcccaagcagaacggcgtgacccacgtggacgctggcgacaagaggtccgcggaggtcagcttcgctgccaagtccaacgaccct

SEQ ID NO: 1035 - DNA, 383 bp, Chlorella vulgaris
tcgacccgcccgtccgcacgaaccagtccaacccgaacgttgcacgcaaccttgaagtcttgccgtggtcctcggagggagggttgagagcaagatgtcgaacggcatatcggacctggttggaaagtccatcttggcaccggctagcctatggccggactatccgccaccaaagggcaaaagcggttgggaaggcacggttgtgagcatcaaatcaaaaaccccagagctactgtacgtcaagtttccgggcgacccgagcaaatatttctttgaggctaaggacgtccgctgctgggtagtgagtgagggctccaaagccacagccgaggcaaagaaggcaggcaagacgccagccaaaaagacagacgtcgacaagcccg

SEQ ID NO: 1036 - DNA, 371 bp, Chlorella vulgaris
agcctgagaagccaggtgaagcagccagccgtgggtgctgcagctgtaccaccggcggtgctgggccaacggacattacccagggtgctgccgctagtcaggacctcagcagcggcagtgatgcgcacagcagcttggaccagcttggtggagaggcggcaagcatccaggcgccagttgcagccccgcggcaccccttccacccatcgctgcgggtcgtgaggggtgtactggcagaggagtgcagcagcctgatgaaggccttcttccgcgcgcggcgccaacagaccaaagccagcaccctcggtagcggcagtggtggcagtgatgcaagcagcagtgaggacagctggtgatatttgacatgtgac

SEQ ID NO: 1037 - DNA, 392 bp, Chlorella vulgaris
accacgcgtccgcggacgcgtaggcagacgcgtgggttcaagtcggcttaccggcacgaaccagttaagagaaaatttttaatgagttggttctgtttctgtttactgtttttggttttttttcacaatgtgcaattggaaaaatagacaataagaaataaaaattggtcaaaggatacaacgcgtagggtggatacctaggcacctatagacgacgaaaggcgtggtatcgacgaaatgctccggggagctggaaacaggcgataatccggagattcccgaatagggcaacctcttgaactacctgctgaattcataggcaggaaagagacaacccagtgagctgacacatcttagtagctggatgagaagaaagcataagcgattccctg

SEQ ID NO: 1038 - DNA, 305 bp, Chlorella vulgaris
accacgcagtccgcccacgcgtccgcggacgcgtgggtgcagatcctggcccgcaagtacaaccaggacaagatgatctgccgcaagtgctatgcccgcctgcacccccgcgctgtgaactgccgcaagaagaagtgcggccactccaaccagctgcgccccaagaagaagctcaagtagactgccgggagttttacacaagccagcagcagcagttggactctcctgcggcatgtatgctgcgagtctgcgggatatatacagcgagtgagctacacagctagaacggtgtaaatgtcattatg

SEQ ID NO: 1039 - DNA, 429 bp, Chlorella vulgaris
gccacctgcagacaccacccagcaacgatggcctccaccatgacctgcaccgccctgcgcgcctcggttgccaggagggctgccccggcccgccgcggtgccgtgaaggtccaggccgcggccaagcagatcccccactggctgcccggcaccccccgcaaggactacctggatgccgctgacctgccaggcaacttctcctttgaccccctcaacctggccaccaaccccactgcgctcacctggttccaacaggcggagctgcagaacgggcgctgggccatgctgggtgttgccggcatgctgaccccggagctgggtgccaagctgggcggcttcaccggccccgccggcagggtgccatggtatgatgtgtccaactacgacttctgggcccccgcccccacactggaggccatctccttcttc

SEQ ID NO: 1040 - DNA, 409 bp, Chlorella vulgaris
gctgaacaagaacaagaagctggtcaagaagctggccaagcagtatgccgccttcctgtcctctgacagcgtgatcaagcagatcccgcgtctgctgggccccggcctgaacaaggcgggcaagttccccaccctcatcacccaccaggactctgtggagaacaaggccaccgagatccgcagcagcgtgaagtaccagctgaagaaggtgctgtgcctgggcgtggccgtcggcaacgtcagcatggctgagcgcgagctctacatcaacatccagatgagcatcaatttcctggtgtccctgctgaagaagaactggcagaacgttaagtccctctacatcaagtccaccatgggcaagccgtaccgcctgtactgagcggcgctggcagcgctgggcctgctacgc

SEQ ID NO: 1041 - DNA, 277 bp, Chlorella vulgaris
accacgcgtccgtgaaaacaagcacgatggccaaaatcaaggcccatgagctgcggaccaagagcaaggccgacttgctggcccagctgaaggaccttaagcaggagctgggtgcgctgcgtgtcgccaaggtcactggcggtgcccccaacaagctctccaagatcaaggtggtgcggaagtccatcgcccgcgtgttgaccgtggtcaaccagaccacccgcagcaagctcagggaggaggttgccggcaagaagtacgtgcccctggacctgcg

SEQ ID NO: 1042 - DNA, 440 bp, Chlorella vulgaris
attcaaaggtcgaccgcccgtccgaccacgcatccgcacccatcttgcgctggtagcagcaagctcggcaggatggtgcggatttcggtgctgggcgatgccctgaagactctctacaatgctgagaagcgcggaaagaagcaggtgctgcttcgcccatcctccaaggtggtcatcaagttcctccaggtcatgatgaagcatggctacattggtgagtttgagtttgtggacaaccaccgctctggcaagatcgtggtggagctcaacggcaggctgaacaagtgcggcgtgatctctcctcgctacgatatctctgctgttgagattgaggactggattggtcgcctgctgccctctcgccagtttggctacttcattctgaccacctcccaaggcatcatggaccacgaggaggccaggcgtaagaagatgggggc

SEQ ID NO: 1043 - DNA, 390 bp, Chlorella vulgaris
aggacgcgtgggcggacgcgtgggcggtttgctcgccatcacctacccctcccacgatgcaggcactcggcatgaagaccgccctggcgggtcgcgtggtggccaccaagcaggccacccgcagcgcagcccgttcctccgtggtggtgagggctgagcgccctctgtgggcccctggtgtggcgccccctgagtacctggacggcactctggcaggtgaccgcggctttgaccccctgggcctgtgtgcggaggcaaagatgcgcacctggtaccagcaggcagagctgcagaacggtcgctgggccatgctgggcgttgctggcatcctcggccaggagattctcaaccccaaccagttctggtataccgctggcatgcccgagaacg

SEQ ID NO: 1044 - DNA, 437 bp, Chlorella vulgaris
attgacttgcatccattcagcaatcgggatggtgtgcacaggagcccccacgacccagcgagcgacccttggcggcaccagggttgcaattgcaagggctcctgtcgcccgggccagcaggcgtacggtgctgacttgcgcggctaagcagcaggtgaacaaagtggtgctggcctactctggtggcctggacacctccgtcatcctgaagtggcttcaggagacatacgattgcgaagtggtgaccttcaccgctgacttgggccagggtgaggagttggagccggccaggcgtaaggctgaggctgctggagtgaaggagatctacatcgatgacctgcgggaggagtttgttcgggactatgtcttccccatgttcagggccaactcccagtacgagggcgtgtacctgctaggtacctccattgcccgcccgc

SEQ ID NO: 1045 - DNA, 421 bp, Chlorella vulgaris
accacgcgtccgtgcagctgcaggccagccgacattaaggagcgtgtacatggtgggtggcgctcgctagcgccgcatcagtggcgcgctattgaggatagtaggtgtgggctgtggccggcgcgtcctgctggctgccaggcaacaacgcgtgggatcttaccgtggtcttcttgtgtaaacgagatgtattcagcaagcttggcaggagatgcagcaaacctttctgacactgccggctggctcgcgtgcatgggacagatgtaaggctaggccagtgtaggtgtgctgtttcgctcgtgtgctgtattgaacttcgtttcggtgctcatgaattatacgacgcgtctggcggcggcgattgccaatggcagctaggtttgatgacatcggggcttgacgacagtaacaatatatctgc

SEQ ID NO: 1046 - DNA, 410 bp, Chlorella vulgaris
cttgtgtcagcggagagggcatagccacggctatcgccaaggctgtggcgcaggctcaggcagaggcaatcgcccaggctgcgtgctgcccgaccgccggtgggataggccagtctgcagcacaggcaatccaggagaagtgtgctaatgcaactgctcgtgtcctggcggctgcgtgcgcagccaatggtcagacgtcggcagacacccagtcggatgtccaaaatgcggtggccgaggccacagcggccgtgtatgctaccccctatgcggacgtgtccagttgtgctaagcagatatgcggcggcccctgcacaagcccgtttccaccccagcctcctctcagccccttgcctccactcagccccaccccaagcaccagccctagccccccttgtgacaacccccct

SEQ ID NO: 1047 - DNA, 409 bp, Chlorella vulgaris
acggacgcgtgggtgttgagcggcttcacaatgtcgaagcggaccaagaaggtcggcattgtgggcaagtacgggactcgctatggtgcgagtctgcgtaagcagattaagaagattgaggtcagccagcattccaagtacttctgcaccttctgcggcaagttctccatgaagcgccaggctgtcggcatttggcagtgcaaggcctgcaagaagacccttgctggtggcgcctacgtgtgcaacaccgccgccgccgtgactgtccgctccaccatccgccgtctccgcgagcagattgagaagtaagcagccaaacccagaaaggcagccgctacatcagcagcaagccaaccactagcccagcgtgcaggcgccgtggatgccagtattttgggcgcccgacatg

SEQ ID NO: 1048 - DNA, 430 bp, Chlorella vulgaris
  unsure (1)..(430): unsure at all n locations
cgacgtttgtaggcccatctgtagcggcagccaggcacgatggtgcagattggcaagaaggctgctagcggccctaagaagggcaagaaggccctgaccttcaccatcgactgctccaagcctgtggaggacaagattatggagattgcctccttcgagaagttcctccttgacaagatcaaggttgagggcaagacaggcatcctgggtgacaacgtcaaggttgtgcgcgagaagaccaagatcacggtgaccagcgagattgccatgagcaagcgctacctcaagtacctcaccaagaagtacctgaagaagcacaacgtgcgtgactggctgcgtgtgattgcgtccaacaaggaccgcaatgtatacgagctgcgctacttcaacatctccgagcaaggtgaggacgangatgaggagtgaatat

SEQ ID NO: 1049 - DNA, 299 bp, Chlorella vulgaris
acaccaagatggcgaaggacaagtctcgctccgccgaggtggtgacccgcgagtataccattaacctgcacaagaggctgcatggcataaccttcaagaagagggctcctaaggccatcaaggagattaagaagtttgcccagcaacaaatgaagaccagcgacgtgcgcgtggacgtcaagctgaacaaggccgtgtggagccagggcatcaagaacgtgcccaaccgcctgcgcattgtgatccagcgcaagcgcaacgaggacgacgacgagaaagaagagatgttctccctggtc

SEQ ID NO: 1050 - DNA, 273 bp, Chlorella vulgaris
agcggccctccctgcagcgttggattaaggctgtgcaaggatggggtcgctcgttgccaacgagaactttacgcatatcctgcgtgtgctcaacaccaacgttgatggcaagcacaagattatgtacgccctgaccgccatcaggggtattggccgccgcttttccaacatctgctgcaagaaggctgaggttgacctgaacaagagggccggtgagctgagcccccaggagctggagagcatcatgaccattgtggccaacccccgcgccta

SEQ ID NO: 1051 - DNA, 393 bp, Chlorella vulgaris
attccagggccgacccgacccgtccacaggtagagagagtgccaccaaagccgccagaatgcagaccaccttcgtgggcaccacccaggcgctgcgcgccaaggtctccacccaggccactcgtggctccaaggtagcaacctccatgcgccgcaccgtcaagtccaagaacgtgaagaccaccgacaccagccagtggtacggtcccgaccgccccaagttcctgggccccttctccgagggtgctgtgccttcctacctgaacggcgagttcgctggtgactacggctgggacaccgccggcctgtccgccgaccccgagaccttcaagcgctaccgccagattgaggtcatccatgcccgctgggccatgcttggcgccctgggctgcat

SEQ ID NO: 1052 - DNA, 382 bp, Chlorella vulgaris
attcttaggtcgacccgacccgtccgcccacgcatccgcccacgcgtccggccaccctgaccattggcaatgtgaagcccgtgggcgacatgcccgagggtaccatcgtgtgcaacgtggaggagaaggctggcgaccgcggctcactggcccgctgctctggcgactacgccatcattgtggcgcacaaccctgatgccggcatcacccgcattaagctgccctcgggcgccaagaaggtgatcagcagcgagtgccgtgggaccgtgggccacgtgtctggcggcggccgtaccgagaagcccatgctcaaggcgggccgcagctaccacaagtaccgcgtcaagcgcaacagctggcccacagtgcgtggtgtggctat

SEQ ID NO: 1053 - DNA, 371 bp, Chlorella vulgaris
gccgaccgacgcgtccgaccacgcgtccgagcgattcgaactaacgcctatccgaggcttcctcgaagacagaagacatcaacatgtctgacggaggggacagcccgaaggccgccgaggcccccgccgccgccgcggctcccgcccccggcgagcccatggacatcaacaccgccatccagctggtgctcaagaaggcgctggctcacgacggcctcgcacgcggcctgcacgaggcctgcagggccattgagcgcggccaggcgcagctgtgcatcctcgccgacgactgcaaccagcccgactacaagaagctgattgaggccctgtgcgccgagcagagcgtcaacctcattgccggtgcccgaccc

SEQ ID NO: 1054 - DNA, 434 bp, Chlorella vulgaris
  unsure (1)..(434): unsure at all n locations
cccacgcgtccggtccaagccccttcagcaaaagatccacgatgcagaccgcctttgtccgctccggcctccgtgccgccgtccccaccgctggcaagggcacccgccaggtgacccgcgcctctgtggagtggtacggccctgaccgcgccaagttcctgggtcccttcaccaaccccccctcttacctgaagggtgagttcgctggcgactacggctgggacacctctggcctgtccgctgatcccgagaccttctcncgctacagggaggttgaggtgatccatgcccggtgggccatgcttggcgccctgggctgcgtcgtgcccgagctgctggaccgcaacggcaccgtcaactttggcgagaacgccgtgtggttcaaggctggtgccgccatctttggtgatgaccggctcaactacctgggcaac

SEQ ID NO: 1055 - DNA, 437 bp, Chlorella vulgaris
gacccaagcgtccacccacgcgtccgcggacgcgtgggcggacgcgtgggctaaggacaaggccatcaagcgcttcattgtcaggaacatcgtggatgcctccgccatccgtgatatccaggacgcttgtgctattgatgggtatgcgctgcccaagctgtaccgcaaggtgtattactgcatcagcgcggctatccactccaagattgtgcgcgtgcgcagccgcaagaacaggcgcaacagggagccgcctgcacgccctggtttcgggccccgccgtgagggccatcagggcgggcagcagggctagcatgggggggggcagcagggaggacaccagcagcagaagtgaggaggcagcgcgccgctgtacatcacgtgtctgatggtgcatggcaggcgggattaattaccacgggcctttctgggatttggcg

SEQ ID NO: 1056 - DNA, 405 bp, Chlorella vulgaris
cattgtccagaagaagaagagcatcatcctaatagagcgcgagctggagcggcagcgagccctggggggccgggcgggggcggggcggtcgctgctgggcaggctggtggccgcggtggtgccggggcgggggcaggacccgctgcagctcatacgcacgctcaaggcggaggtgtcggccctggaggcgttgcggcaggcgctcttcacggacatacttgaactgaagagggagcgtgagcgggcgctggtggcccgcacgctgctggggcacatgcagaatatgctggggtatatcctcagtgtgtactgtatatataggatgtttgccagcgtgaagaacctgctgtttggggaggacttgtcgtcagaccccgtcagccgcacggtgggcctgctgctgcg

SEQ ID NO: 1057 - DNA, 374 bp, Chlorella vulgaris
actgacttgtcctcgccgccaggaggcctcttcgagccctgcctggctatcccacttaggacaagatgccgcctaagcgtacgagctctcaggaggagaatgtcaccctgggccctgccaccagggagggtgagctggtgtggggtgtgtgccacatcttcgcgtccttcaatgacacctttgtgcacgtgactgacctgtccggcaaggagaccctggtgcgcgtgactggcggcatgaaggtcaaggccgaccgtgacgagtcctcgccctacgctgccatgcttgccgcccaggacgtggccgctcgctgcaaggagctgggtgtgaacgctctgcacatcaagctgcccgccactggcggcaacccgcac

SEQ ID NO: 1058 - DNA, 403 bp, Chlorella vulgaris
gcagcccgctgccctccgctactcctcgaccatctaaccagcagaaatggtgttcgcaaccaaggcagtcgccagcaaggccgtctcaacctggggcaagggcgccttcccgaagcctcccatcgatgtgctgccccttctgaccgctgtgggcgtgggctgcgttgccgctgtgtggtccatgggccgtaacctggcagtcaaccctgaggtctgctgtacaaaggcctaccgtggtggtgacagcctttggaatgatgaggagattcgctccaagtctgaccagttcaggcccttccccttcaatccgggcatgatggccaagcttggcaagggcagcactccctctggcgagtggagccagtgaccgaccgccttgagcagccctgcagcatagcaagca

SEQ ID NO: 1059 - DNA, 435 bp, Chlorella vulgaris
  unsure (1)..(435): unsure at all n locations
ataggtcactcgactacttgggttttctacagtagccgaggcctaagggcgaagggtgcttcttcactcagacacggctcctgccgatcgtctgaggaaccgtgcatcatgacttcgaagttccctgcacacgcaatcacaagggagcccgcgcggacgactatagtgaacagccttaaggagatgtggccctttgttgcgggcttctctctaactggctatatcttcacaaaggttgccctgtcagtgacagatgaggatgtgaagaactcaaagtttgccaaccccaagggccaaaaccactgagccctgaactggcaggcaactgggaagcagcgaacggcaatcctccgcggacagaccggtgtaggtgtangcggtaatgcaacgctgcgcacggctcctccgttgcagcatactgcagcagccgggatg

SEQ ID NO: 1060 - DNA, 396 bp, Chlorella vulgaris
accacgcgaccgcggacgcgtgggcggacgcgtgggcggacgcgtgggatcgagcgcgtggcaaaggccaaccgctaagcgccttctcacatcatgtctgctggcgcgcagtgagagcttggagctggggaggagcagcggcgctgttgtagatctggcgtgggcgggggtgttggagggatgcaggcgggcggcgttgccgcgcctgcgcttgttgctgctgccgtttcatgcctgctggtaggagccgaggcaaatggcgcagactggccaactgtggcgttggcgtaggcacttggtcatcgtacgatgtggcttgggagcggcttcgctttggtcggggtcaagaacagtgctggcttgtagcaacatgcacttgacgacacaaggctgcaa

SEQ ID NO: 1061 - DNA, 363 bp, Chlorella vulgaris
ggtcgacggacgcgtccgaccacgcgtccgctgtcctccaacgtgacagtgaggcgtgtgcgcgtgcgcggaggcaactctaagttcagggcgctgcgcctcgactcgggcaacttctcctggggctccgaggccgtgacccgcaagacccgtatcctggatgtgtcttacaacgcctccaacaacgagctggtgcgcacccagaccctggtcaagaacgccatcatccaggtggacgcaacccccttcaagcagtggtaccacgtgcactacggccaggaggtcggcatcaagaagaaggccgccgcagccgccgcagccgccgcacccgccgagggcgatgcgcccgccgccacccagagc

SEQ ID NO: 1062 - DNA, 430 bp, Chlorella vulgaris
ccggtgggaagggcttgtcttccgcaagccaaaatgccgtccataggcttttaccgcaactatggcaagaccttcaagaagccccggcgccccttcgagaaggagcggctggatgccgagctgaagaccgtgggcgagtacggcctgcgcaacaagcgcgagctctggcgtgtgcagatggtgctgtccaagctgcgctccagggcccggtccctgctgaccctggacgagaaggaccccaagcgcctttttgagggtgaggccctcatgcgccgcatgtaccgctacggcttcctggacgagacccagaacaagctcgattacgtgctggcgctcaaccctaccgacgtgctggagcgccgcctgcagaccctggtgttcaagctgggccttgccaagagcatccaccacgcgcgcgtgctcatccgcc

SEQ ID NO: 1063 - DNA, 364 bp, Chlorella vulgaris
aaagccgccagaatgcagaccaccttcgtgggcaccacccaggcgctgcgcgccaaggtctccacccaggccactcgtggctccaaggtagcaacctccatgcgccgcaccgtcaagtccaagaacgtgaagaccaccgacaccagccagtggtacggtcccgaccgccccaagttcctgggccccttctccgagggtgctgtgccttcctacctgaacggcgagttcgctggtgactacggctgggacaccgccggcctgtccgccgaccccgagaccttcaagcgctaccgccaaattgaggtcatccatgcccgctgggccatgcttggcgccctgggctgcatcttgcccgaggtcctgc

SEQ ID NO: 1064 - DNA, 399 bp, Chlorella vulgaris
tgccaacaacaccactgcctgccagcactcctacactgatgatgggagcagtaattgtgctacagggcatggcactgatcggtgcagtggtgacaggggtgcttgcacggaagcggcgagaggagatggagcacttgaatgccaagctgcgacacataaatgctgagctgcgtcggcagcgagaggaggcgctgaggattgatggcttggcagaagaggtccctggcagcagcagcagcagcagcagccaggcagcagatgcagagtgggtcgcctaccggtcgacgctggagaggagcctgggagccccggcagccgcccacccggtggaggcctatggcgacagcaagctgagcctggcagggtcccggaggcggatcggcgcagccatcagggctg

SEQ ID NO: 1065 - DNA, 436 bp, Chlorella vulgaris
cccacgcgtccggtggaatcccccgtcgacaacaggtccaaggttcacaagatgcagaccctctctgcccgtttcggcgtccgcgcccctgtctcccggggcacccgccaggtgacccgcgcctccgtggagtggtacggccccgaccgcgccaagttcctgggccccttcaccaaccccccttcctacctgaagggtgagttcgctggcgactacggctgggacacctctggcctgtccgccgatcccgagaccttctcccgctacagggaggttgaggtgatccatgcccggtgggccatgcttggcgcccttggctgcgtcgtgcccgagctgctggaccgcaacggcaccgtcaactttggcgagaacgccgtgtggttcaaggccggtgccgccatcttcggcgatgacgggctgaactacctgggcaacc

SEQ ID NO: 1066 - DNA, 396 bp, Chlorella vulgaris
  unsure (1)..(396): unsure at all n locations
tcgataaangctgagctggtggctacggttctccacaggccctccgggcagtgctgagttgctgccctgttgccgtgtggttgtacagtagacaatccatagggtagcaggggtaaagatggcgacagccctccagaaaactcgcgccctacatctatacaggcacagcctgaaaaacatgctcagctgggctgtgaggagagagattttctatgaggaggctgagcgcattcgtggcgagttcgaggcaaacaaggccctcactgagccgattcagatagagcgcgcgctggagaagggggaggcaaagctgcgggagatgctgcaccccggaccttacatcgtgccctaccggccaggcggcagcatgtatgcccgcaaaccccccttccccaa

SEQ ID NO: 1067 - DNA, 433 bp, Chlorella vulgaris
ctccacaggacacgatgcaggccctgcagaagcctttcaccgcccagcgggcccagctgcagaaggctgcttccagccggacctccgtccgcgctcctgtggttgtgcgtgcccagaagcaggaggtggaccgccgtgccgccctgggtctgctagctggtgccgctgccctggtcgccggtgcccagccctctgaggccgcctatggcgaggctgcccgtgttttcgccagcaagcccaccaataccaagggcttcaatgtctactccggcgagggcttccagctgctgatcccctccaagtggggccccggcaaggagagggacttccccagcaccatcttcccggtacaggactccttcgatgacgtgaacaacgtcatcatcaacgtgcagaacgtgtctgcctccagcattgagagcctgggctcccc

SEQ ID NO: 1068 - DNA, 447 bp, Chlorella vulgaris
gtcgaccgacccgtccgcccacgaatccgcatcaaccccaacgccgtgtcctctgcctccgagtaagcagccagcggtggtgctgcggctgggcttccacgtgtctgcggctgcgcgcgtttgatacttgcgacccgccttggcagtgaagctaagccctacatttggcagcgaatcagataatggctccgtacgagcatgcgctgttacatagggtcgccgcacagggtttcagaattggggcttggcgctggccccttgcctgtgccccagtgtggtaccgccccccgcatttttacctgtcggaattgccttacttgctgtctcagcttgggccgtttgggcgggggtttgcaggagatgggctgcaggttgtatgtgtcttggcctcaaacggaacggtcgattcgaggatcacactgttgccatgttttgggtttgttgtgt

SEQ ID NO: 1069 - DNA, 160 bp, Chlorella vulgaris
ggtcggacgagtgtctgtcttccgcgcatgcattttccatctctcaagctttgagcaacgtgcagccgccgagcctttgcagcgggtaggcctgacttgttgcagcagcagcagcagtgcgagcgtccgcgcgtggcttgctttgcagtgtaacacgtcg

SEQ ID NO: 1070 - DNA, 368 bp, Chlorella vulgaris
gtccacccatgcatcttcagctgaggagcaggcatggtgctcaagacccacacttgtggcttcagcggcctcaggatttatcctggcaagggaatcctgttcatccgtgttgatggccaacaattcctcttcctgaatcagaattgcaagaggatgttcaaccaaaggaagaggcctgcaaagattgcttggaccaccctctacaggaagcaccaccgcagggaccagtaggcgcaggttgcgcgcaagaagcgcaggtctgccaccaaggtgcagacgcgctcaattgtgggcgtgtccctggaggtgattcagaagaagaacgcagataagcccgatcagcgcaaggcttcatgcgaggcggccct

SEQ ID NO: 1071 - DNA, 428 bp, Chlorella vulgaris
gctcaagcggccgcagctgcagaagaagtaccagggggagatagacgccatgtatgccgccctcaagaagagctgaggaggtctgggggcgctgcagcccgggtggtaggcgccagtgttagcggtgcagagaagcgtcggacctatgggaacggagctcagcggacctatgtgtatggagctcagcagggttctatttgggtgacaaaatagtgcgggcgcagctgcagagcaagtgccagggagggtgcgtgcgtgcacatgtgccgcccagatgagtgcctgagcgggtggggtgcgtgtgggttatctaggttaagtggcgaggtgagcggacagtgggaggggggtgggggtgttgcaccaaggagtggtgggtttggatgatggcttacaatttaactactggctttggtagcaaaatattg

SEQ ID NO: 1072 - DNA, 421 bp, Chlorella vulgaris
agcttctcctgcaactagccaacaacccctgaaccaactcatacttgcactcatcatgagctctcgcgacgccaacgtgaaggccaaccaggccgctgacagcgtcagcaacaaggccagccaggcctgggagtccgtcaaggagggtgcctccaacgcggccgagtccatcaagcagactgccaaccaggccaccaaccgcgcaagcgaggctggcactgaggccaagcaccgtgcccaggaggccaaccagcaggccaagcaccgcgctgacgaggccacccagtgaacttggctgaatttacgtcatccagcccagggctgctcgtgtaagcatgcttttaagtgtgagcctgggtgtataaagttgtgcagagtagctgccactgaatagtgtgactgtaacggtagttgtgccttg

SEQ ID NO: 1073 - DNA, 157 bp, Chlorella vulgaris
ttctcctgcaccttttcctcaacccctggtccaactcttacctgcactcatcatcagctctcacgacgccacggtgtaggccatgcattcagctgacagcgctggcaccgttgccagcgagccctgtgagtctctctgggcgggtgcgtccatcgct

SEQ ID NO: 1074 - DNA, 377 bp, Chlorella vulgaris
aacgccgtgtaccccggcgaatcctttgaccccctgggcctggctgacgaccccgacaacttcgccgagctgcgggtgaaggagatcaagaacggccgcctggccatggtctccatgctaggcttcttcgtgcaggccattgtgaccggcaagggccccatcgagaacctgaacgaccacctgtccaaccccgggaacaacctgtgggctctgtctgccaccctggccaactaagcagctccccctggccgtgccttgaacctgcctgccccgggcgctcccggctattaacggacgatgcgtccctactgaaggcatctgagcagcttttagtcagccattgcggcacacttttgggtgtgctgggattctgcatg

SEQ ID NO: 1075 - DNA, 431 bp, Chlorella vulgaris
agccacgcatcagctcaagcgtcatcacgacgaaggttcacaatgatgcaagaccctctctgccagtctcggcatcggcgtgcctatctaccggagcggcagccacgtgatgagcccctccgtggtgtagtactgccgcgatcacacgaagttcttgcggcgcttcatcaatgaccggttccaacctgaacggtgagttcgctgactactacggctacgacagctctgacatgtctggtcattctgagaatttctaaagcttcacggacgatgacgaggttcatgccaggtaggccagccgtggcacgcttggctccctggtctgcgagatgctggagctgatgcgcaacgtcagctttggcaacaacgccgagtcggccatggcctgtaacgctagcttcgccaactacgggcagaactacctgagcaac

SEQ ID NO: 1076 - DNA, 358 bp, Chlorella vulgaris
aagcgcatcaaggagtgcgagcttatagtgcaggcatctaaggactgcgtggagaagacagtcaagcggctgcgggacaagcttaaggagcgtaccctggggcagattttgtacctcatgcaggggtcagcagtgccagttaaacagcggattgcggtggctctctgccacctcacgtctcctgacacgcctggcaacaatttgcagctcatgtatatggacaagaagggcctggatgtcttgttggacatggttacggacccacatgtggttggcgaattgcagaagcaagcagcaggcgccatctttgacgtggcacagcacatcaatgcggcagctccccttgacgtgggacccc

SEQ ID NO: 1077 - DNA, 426 bp, Chlorella vulgaris
cccacgcgtccggcggcaagcgaacaaccatggcgccaaaggagcagaagtccaaggaggccaaggccatggctgcggccaatgccagcaagggcaagaagaagaagtggtcaaagggcaagatgaaggagaaggtcaacaatatggtcaagttcgacaaggccacatatgagaagctgttgacagaggtgcccaagtacaagatgatcactccctctgtgctctctgacaggctcaggatcaacggcagccttgcccgtgccgccatcaaggagctccttggccagggtctcatcaaggttgtggccaaaagcgcaagccaggagatctacactcgagccaccgctgctgcatgattgactgaatgtttgaaggggcagctgtgttggaaggcttggcagatcccgatgtaaatgcagaagcccc

SEQ ID NO: 1078 - DNA, 277 bp, Chlorella vulgaris
gcgtgggcggacgcgtggggaagatcaccagcccacggtgcgtgggatagctccaggggtctcacgcaggcatccgcactatgcctttcaagaggtacctggagattggccgtgtggccatgcttaactacggccctgagtacggccagctggtggtcacctcagacgtggtcgacgagaccaggcccctgattgaccggcccgacgacactcgccgtgtggagaacttcaagcgccttgcagtcactgacttcagggtggagattccccgcctggc

SEQ ID NO: 1079 - DNA, 362 bp, Chlorella vulgaris
gttcacgggccgacccaagcgtccactcttttcgtagaacagagggtctttcaccatggtgacgcctctcatcaaggtgaagagcgtcaagaagcgcactaagcgcttcaagcgtcaccagagcgaccgtaagatctccgtcaaggagagctggaggcgccccaagggtattgactcgcgggtgcgcaggaagttcacgggatgcggcgtgaatatgcctaacatcggctatggcaccaacaagaagaccaggcacctcctgcccaacggcttctacaagtttgttgtgagcaacgtgaaggacctggagctgctgaatgagcacaaccgcaagtactgcgccgagattgcgcaaaacgtgt

SEQ ID NO: 1080 - DNA, 396 bp, Chlorella vulgaris
gaaggtggagaagaagaacggcaagaccacgctgcgctgccccaagatccagcgcctggtgaccccccagacgctgcagcgtgagcgccggaggaatgcgctgcgccgcgagcgcatcacccgcaagaagaccgaggaagcagagtaccacaagctgctggtgacccgcatcaaggaggagcgggagcgcaggtctgagtctctggcaaagaagcgtgctctgcgtactgcttcccaggcctccaaggaggcataagcccctggcagatatgggagacttgtccagcagggatggcagtgtgcggggcccggagcagcagcattgacacagggggacttagtgtgggccttggctggatgcacgagctgcctctcggcggggtttgagagcctgct

SEQ ID NO: 1081 - DNA, 425 bp, Chlorella vulgaris
acccacgcgtccgcccacgcgtccgcgcactaagcgcttcaagcgtcaccagagcgaccgtaagatctccgtcaaggagagctggaggcgccccaagggtattgactcgcgggtgcgcaggaagttcaagggatgcggcgtgaatatgcctaacatcggctatggcaccaacaagaagaccaggcacctcctgcccaacggcttctacaagtttgttgtgagcaacgtgaaggacctggagctgctgatgatgcacaaccgcaagtactgcgccgagatcgcgcacaacgtgtccaccctcaagcgcaaggcgattgtggagcgcgccggggagctgaatgtcaagctcaccaatgccggcagcaggctgcgtaaccaggaggacgagtagccgcctgggcctcagcagcagcggcggtagcagc

SEQ ID NO: 1082 - DNA, 430 bp, Chlorella vulgaris
actgatgggcgcaaggagattgaggcgcagctggagcagctgaagaagcactgcagcgtggtgcgcgtgattgcccacacccaggtcaccaaggtgcccatcggccagaagaaggcgcacgtcatggagatccaggtcaacggcggcagcgtggcccagaaggtggactttgcctacggcctgtttgagaaggcggtgcccgtgagcaccgtgttcagccaaaacgagatgattgacaccatcgccatcaccaagggccacggcactgagggtgtggtgacccgctggggtgtgtcccgcctgccgcgcaagacccatcgtggtctgcgcaaggtcgcctgcatcggcgcctggcacccggcccgcgtgtcctggaccgtggcccgcgctggtgccatgggttacaaccaccgcacggagatgaacaaga

SEQ ID NO: 1083 - DNA, 435 bp, Chlorella vulgaris
agtatattttatactttttatcttttttataaattatgtcttttttatattataaaaaagcgtgctatcttttttttttttaagcctacattttattttccatttacgcttctcctttctccattataaatggagaaccaaaaatggaggttctatccatgctattagcttttttacacagtgtcttttttacaaagtaaaaaagttttacaaagtaaaaaagttttacaaagtaaaaaagttttacaaagtaaaaaagttttacaaagtaaaaaagttttacaaagtaaaaaagttttacaaagtaaaaaagttttacaaagtaaaaaagttttacaaagtaaaaaagttttacaaagtaaaaaagttttacaaagtaaaaaagttttacaaagtaaaaaagttttacacagtaaaaaagtttttaaaagtaaa

SEQ ID NO: 1084 - DNA, 366 bp, Chlorella vulgaris
gaccgacccgtccagctgaacaaggccgtgtggagccagggcatcaagaacgtgcccaaccgcctgcgcattgtgatccagcgcaagcgcaacgaggacgacgacgagaaggaggagatgttctccctggtcaccctggccgaggaccagagcagcaagggcaagggcgtggtggtcctggaggcataaacacacacacgcgcctcgcggggggagctgccgcagcagccagctggcaggttccgtgcctggggatcgcgctgggcctcgcgtgggccttgcctttcaaacggttggtgtgggcggcgtttctggcggcgtttagggtctcttgcagacccttggtccttgtgcaaggcccagatg

SEQ ID NO: 1085 - DNA, 392 bp, Chlorella vulgaris
cccacgcgtccgcttcctactgtgaagcctcgatatatgcggggatcagaggtgactttgaggtgatcttatatcacctgtaacgtacacttgtgcaccttgtgcaccttgtggtgccaccttgtgagggaggagctatgccgcccagcgaagatgtcatggcagagcaacggaaagggaacgatgttgttgtgcctcgccacccctctggcacccaggtgtaccttgtgggcactgcccatgtatcatccaaggtacatcaagacgtccttgacctcatgacaacagtcaatccagcagttgtggtagttgaacttgacaaggagcgttataacaagcttctaaaggcggctgacagcggtgacacgtatggtcttgcccgcgtcacgagt

SEQ ID NO: 1086 - DNA, 436 bp, Chlorella vulgaris
agaggaaggcagtgcatctgctgaggaccgaaacggacaaccatgcagattttctgcaaaacagacaggactcatgtccttgagcttagctccgaggccactgtggccgatgtcaaggctgccatcgaggccagccagggcatcccctgcgatgcgcagcgtgtgatgttctctggtcgccagctggaggaggaggcctccctggccgcctgcggcgtgtctgacgacagccagctgtacatcctgatgcgcctgctgggtggtgccaagaagcgcaagaagaagacctacaccaagcccaagaagcagaagcacaagcacaagaagatcaagctcagggtgctcaagttctacaaggtagacgacagcggcaaggtgcagcgcctgcgcaaggtttgcccccagtgcggccccggcatcttcatggccacgcact

SEQ ID NO: 1087 - DNA, 430 bp, Chlorella vulgaris
agaagccgtggaaggaggtgcaggtggccgtgggcgacctgcctgccttctcccagctgctgggcgatggcaggaagccattcaacgggccggcggcgctgattgggctggatgtgctgtcgcagcggcgcgtggtggtcggggcgggggcggggctgaggggccgtgctcgggaggtgctggtcagcaaggcgtaaatagtggtggcgctatgggaggacaggcgggaaggcagcactgcaaactgaacgcggacattcaccgcgattttggatttggagaagtaagtgccaggtggtttgttgccaagaattgatgtaggaatctcgagacaagttgtccgtgctgtgcatggcttttggtgggcgtgcagctcgcctggaagctgtctcaagtcgcacggagtttggagttgatcgtgccaatctgt

SEQ ID NO: 1088 - DNA, 437 bp, Chlorella vulgaris
agagaacgagatcaggcacgcccgcctggccatggtggccttctttggatttgcagcgcaggcggccttcaccggcgagggcgccctgggcagccttgcaaagttctccaagtccttctaagccaccagcgcctgtcctcatggggagcccaaggcctgcatggggcaaaagttgtgctacccttacactgagaagaatcaactcctttcttgccgctgtcgtcatatgctcgtccaatctgtatctgagaggtttgaagggccctggggccagtggctgtcgaatgccccatttgattgctttacaaccaggcgtttgacagacattattggtcccagccgccttcgttgtagtcagcagggttcgcataacagccaaagtcaggcgcccaccgtgtgtgccgtcctgccccttaagaatgtattcagcgatctgc

SEQ ID NO: 1089 - DNA, 84 bp, Chlorella vulgaris
cacgcatccgaaaaaaaaaaaaaaaaaaaaaagaaaaaaaaaaaaaagctaaagacaaaggtaacaaaaaacaaagagacacaa

SEQ ID NO: 1090 - DNA, 418 bp, Chlorella vulgaris
gacgacgcgtccgaccacgcatccgcccacgcgtccggccggggtagagggtgccccggacatcgccgtggcgcaaatggcggctgcagatgaagccaagtgagagttcctctggaggggctacgtaaaggccatggggagtgtagtgcatgcgcccatgatcggtgtgggagggtcggtaactcacttggcaaaggaggacaccttgtttttgctatagtaggcaaggagggagagctacgggtgctatttatgactgcattttgggagtgtttgctgtcgggcatccacggtaccacgccaaggcatacttgggctcggctgaaactctgctcacttgacttctgaaatttgcgcctgctggctattgcacataggttaagaatctgataatagccgctgcattttgtaccccccg

SEQ ID NO: 1091 - DNA, 429 bp, Chlorella vulgaris
agctggcgatgctgaggagctggagaaggagaacgcaaagaagaccactgccctcaagggtcaggcggtgttctccattgccaaggttgacactgtcaccggcgagatttctggtgtgttcgagtctgtgcagccgtctgacactgacctgggtgccaaggcccccaaggatgtgaagatcaccggcttgtggtatgcccagctcaactgattgtccggctccctgagctcagccaggactacgctagtggcttggttaccattgagttctgctgcccagtaggcttcctgcctgtgtcaacaggagttctatcgttgcatctgtgcttttgcatcaggagaagattaaaagctatgtttgttggtgcatcctgcacaagggattgtgtaaccatagacttgcgtgccctaagtgtgggatatgtgcct

SEQ ID NO: 1092 - DNA, 434 bp, Chlorella vulgaris
acgtgcataagacctgccgccatgggtcgtatgcactccaagggcaagggcaagagccgctcggctctgccctacaagcggagcccgccctcttggctcaagatttccagccaggaggtgaacgagctcattggcaagtttgccaagaagggcctgaccccctcccagatcggtgtgctgctgcgtgacagccacggcgtggcccaggtcaagtctgtgaccggcagcaagatcctccgcatccttaagggccagggtttggctcctgagatccccgaggatctgtaccatctgatcaagaaggccgtgtccatgcgcaagcacttggaggccaaccgcaaggacaaggacgccaagttccacctgattctggtggagtcgcgcatccaccgcctggcccgctactacaagaagaccaagaagctgccgcccaa

SEQ ID NO: 1093 - DNA, 254 bp, Chlorella vulgaris
aggagacaaaaaaaaaaaaaaaaaaaaaaaaaaaaaaaaaaaaaaaaaagaaaaaaaaaaaataaaaaaaaaaaaaaaaaaaaaaacaaaaaaacatggtaaaaaaattgaaaaaaaaaaagtaaaaaataagggttggcatctttaagggttcaggctttatttcctcttaaatgggtgttctatcctcttcaaaggttttacctaattcaatttaagtgtctgttttttaaaaagatcctcagggtaaaaac

SEQ ID NO: 1094 - DNA, 206 bp, Chlorella vulgaris
ccgtcccaccacgcatccgaacccccgcgcctacaaggtgcccgactggttcctcaataggcagaaggacatccgcgacggccgcttcagccagacgacctcctccgccctggacaccgggctgcgcgatgatttggagcggcttacgacgctcaggacccagcgcggtttgcgtcactactggggcctgaccgtgcgcggccagc

SEQ ID NO: 1095 - DNA, 367 bp, Chlorella vulgaris
ccgtccgaccacgcatccgggcatcacccgcattaagctgccctcgggcgccaagaaggtgatcagcagcgagtgccgtgggaccgtgggccaggtgtctggcggcggccgtaccgagaagcccatgctcaaggcgggccgcagctaccacaagtaccgcgtcaagcgcaacagctggcccaaggtgcgtggtgtggctatgaaccccgtggagcatccccacggtggtggtaaccaccagcacattggccacgcctccaccgtgcggagggacgcgccgcccggccagaaggtcggcctcatcgccgcccgcacgacatgtcgtatccgcggtaccgccattgtcaaacccgacaaggagtaagcg

SEQ ID NO: 1096 - DNA, 432 bp, Chlorella vulgaris
agagggctccacccccagctacctgaagggcgagttcgccggcgactacggctgggacactgctggtctgtctgccgatccccaaaccttcgctgcctaccgcgaggttgaggtcatccatgcccgctgggccatgcttggcgccctgggctgcctgacccccgagctgctgcagaacgccggcgtggccagcttcggcgacgctgctgtgtggttcaaggctggtgcctccatcttcggcgatgatggcctgaactacctgggcaacccctccctggtccatgcccagtccatcgtggccaccctggccgtgcaggtcatcctcatggctcaggctgaggctttccgtgtgagcggcactgccccctggagcggcgaggagctcgacaccctgtaccccggtgatgcctttgacccccttggcctggctga

SEQ ID NO: 1097 - DNA, 434 bp, Chlorella vulgaris
agccgcaccgtcaagtccaagaacgtgaagaccaccgacaccagccagtggtacggtcccgaccgccccaagttcctgggccccttctccgagggtgctgtgccttcctacctgaacggcgagttcgctggtgactacggctgggacaccgccggcctgtccgccgaccccgagaccttcaagcgctaccgccagattgaggtcatccatgcccgctgggccatgcttggcgccctgggctgcatcttgcccgaggtcctgcagaggtacagcggcatcgagttcggcgaggctgtgtggttcaaggctggcgctcagatcttctctgacgacggcctgaactacctgggcaaccctgccctcatccacgcccagtccatcattgccaccctcatcacccaagtggtgctgatgggcgccgttgagggctaccg

SEQ ID NO: 1098 - DNA, 417 bp, Chlorella vulgaris
agcgcctttgcgggccagcgctgttgctgccatagccacgccccatccggacatctgtgaagtgctgctgaccagagaaaagatagcagagagagtgacagaagttggtaaagagctggctgtcgaatatgcggacaagcggccactagtcatagggacgctgaagggcgccatcgtattcatgagcgaccttgtgcgggccatcgagccggtcccagagggtcttcagctagagttcctgcgtgcaagttcttatgggaacagcacagtctctgctggcaaggtggacctaaggagcacggcagcggttgagaatgtcgtcggccgccacgtgctgctggtggaggacatagtccactctggcaggactgccgcgaagctcctgcggcactaccaagatgccggggcgccagcgtc

SEQ ID NO: 1099 - DNA, 421 bp, Chlorella vulgaris
accaagatcggcgtcatcgagtcgctgctggagaagtgtgacaagatcctcctgggcggcggcatgatcttcaccttcttcaaggccgagggcaagtctgtgggctcctcgcttgttgaggacgacaagctggacctggcccgggagctgacggccaaggccaaggccaagggcgtgcagttgatcctgcctaccgacgtggtggtcacccagaagttcccctccaaggacaaccccgcgcccgagtccaaggtggtctccgtggatgacatccccgatggctggatgggcctggacattggccccaagtccgtggagtacttcaaagtccgcctaagcgactgcaaaaacgttatctggaacggaccggctggcgtgtttgagttcgacgccttcgcaaagggcaccttcgccattgctg

SEQ ID NO: 1100 - DNA, 436 bp, Chlorella vulgaris
acccacgcgtccgcccacgcgtccgcccacgcgtccgctccgtataccacacagggagcaaagtggagaaggcgatgctgtccaccgctttccgctgccctgctctgcgcaaggccggccaggccaaggctcggagggcacctgtggcacaatccaaccccaggagcccctctctatggacccccgcctcccagcgcagcgtggatttcaagtcgcggtcagacaaccagattgtgtgcggccaggggccggcaccgcctagccctctggtcatggagcggtttcagcaagttatctcacaacttttccagcagcgcattgtgcggctaggaggcgcagtggacgatgacatggcaaaccttatcgtggcgcagctgctctatcttgattcagcagaccctaatagggacgtgaccctgtatgtcaactcccccgg

SEQ ID NO: 1101 - DNA, 336 bp, Chlorella vulgaris
acgtaccccaagtctcgcttctgccgtggtgtgcctgactccaaaatccgcatctacgacgtgggcgcaaagaagtctggcgtcgatgccttcccttactgcgtccacatggtcagctgggagaaggagcacatctcctctgaggctcttgaggcggcccgcattgctgccaacaagttcatggtgaagaatgcgggcaaggacgcgttccaactccgccttcgcgtgcaacccttccacgtgctgcgcatcaacaagatgctttcgtgcgccggggctgataggctccagaccggcatgcgcggcgccttcggcaagccctttggcgttgctgcc

SEQ ID NO: 1102 - DNA, 62 bp, Chlorella vulgaris
accgacgcgtccgacgacgcatcggcggacgcgtgggcggacgcgtgggtgggcgcgtggga

SEQ ID NO: 1103 - DNA, 434 bp, Chlorella vulgaris
  unsure (1)..(434): unsure at all n locations
acccacgcgtccgccgggtgcctacaactctccctgtgatcgtcaagcgttgcacacggtgcctgaggcacgtacgcttgggacaacagggtaactcgttcacttgcaggagactttgccccttgtcttgacgactgagttggatcggccctcttaggcagcctgctgcaccaggccagcctcccttgagtgtggtgtagcatggccagcgggtttggcatcaacgggggccagggaaggtgctaccctatctggatggacttctcagagtgtatgagcaagactgatgaccccaagctgtgcaaggattatcgcgatgactatctggagtgcttgcatcataggaaagagtttcagaagctgaatagcttcttccgggaggacaagcggcagcaggacgagcgggcctctggcaagagcagtancgggggtgg

SEQ ID NO: 1104 - DNA, 429 bp, Chlorella vulgaris
accttgacataaacggaacaatctttcctccttctgctgcaagcagtgcttttgaaaaggactttgggttgctgccggagcaagtcgagtcctaagggactcttttgcagcacagcttgctggctctttcgagcccttccgccactatgggatctaccacctacaggccttactcagcaaggcaggcaggacggatgttagcggtgaagatgccataaagactgtgctggagtcttggcaagcagctgagccatatcctgatgtggctcctggtcttagagcgctccacgctgctggtatacaggtggcagccctgactaatggctctgagagcatcgcccggggcgtgcttaccaatgcgggggtgtgcgagcttgtaagccccctgctggatattaatatggccagcgcatggaagccagcgagaga

SEQ ID NO: 1105 - DNA, 434 bp, Chlorella vulgaris
agttgctgggtgcatcgagcatgttgactgcggccttggctgggtctaggatcgctactctgtctaggcatctggtgtctaacgccggggttgctgctgctgccaaccgtacagttgtcagagccatggcaactaccaatgacacccctaggactggaaagataagcccttcagacacggcgctgcttgtgtgtgacgtccaagagcggttcaggcagctcatctacggcttccctgcagtggtggacacctccaggcgtatgattcgagcagccaatgcgctggagctgccggtactggtgacagagcagtaccccaaggcgctgggcaacaccgttgatgagctgaaggaagtgctggatggcaaggctgtagtggttgccaagaccaagttcagcatgtgcacagacgagattaatgctgagctgtcaaag

SEQ ID NO: 1106 - DNA, 412 bp, Chlorella vulgaris
cgcgtccggcgcaacaaggacgacgacgagaaggaggagatgttctccctggtcaccctggccgaggaccagagcagcaagggcaagggcgtggtggtcctggaggcataaacacacacacgcgcctcgcggggggagctgccgcagcagccagctggcaggttccgtgcctggggatcgcgctgggcctcgcgtgggccttgcctttcaaacggttggtgtgggcggcgtttctggcggcgtttagggtctcttgcagacccttggtcgttgtgcaggccccagatgtcgctgtatcgaacccagctggcggtgccctgttgcggtgcttctggctcactgtggttctgaggcagcagtggcagggttgccagagtgtgtcttgcacctgtcggtgttgcacgcggggtgc

SEQ ID NO: 1107 - DNA, 347 bp, Chlorella vulgaris
ccaacttgtgtgggagcttgtgaagcacaacaacgcattccttgtgaagggcgtgaacggcaccgtgttcagccgggaggctggtaacctgtataaccgcaactcctacaagtattctggcctggccaacttcaactccactgtggatgttgctgcggctaaggatggcggggtgcaggtgtccaagtcccgtggcaagaacgccaacaagcccagcgctgcccgtgctgtgtctgtaatcaagaagaacgctcgccgcaccaactacgctgtcggcgctgaggcgcagcgcgttcgccccaagctcaagaaggctgccgttgcccgttcgtccgccgtcacaagag

SEQ ID NO: 1108 - DNA, 318 bp, Chlorella vulgaris
ccaaacgtctacattgatcattcgtagtgacatatatatcctctatccgtctgcccctggtgcgtgcttacaatgtctcgtattgaccatcattgctcgaaggatatatggccggagatccccgaggttatgagagctaagtcccattatgtcaactagtgaatatgccttgggcttcggatagttcgttgccagtatcttactggtctggctcgccggcggtcaagccgtcctcggagtgtgcagtgtctatgatcaacaagacagtctggtgcaggacgaagccagtcagttcttaagagatgctcatgagcccct

SEQ ID NO: 1109 - DNA, 425 bp, Chlorella vulgaris
acccacgcgtccgcggtcctccttcgctggcatctcccgccaccccaagtttttgaagctacgcgaggtgctgctagagagggccgccctcccagccttccacggcattgtgtttgcccgcacccgcgaggcggtgcgctccctgacccggctgatcaagggttgcccagacctgcagttcctggaggtgtatgccttcatgggccatgggggccgcacaggcgagggcggcgccaagggcatgcgagtcaaggagcagcagcaggtcatggagcgcttcaaagcaccagggcggaagctgctggtgtccacctcagcgggcgaggagggcatcgacgtccccaactgcgagtttgtggtgcggtacacagctacacagacagggcgggagctcatccaatccagggggagggcacggatggctg

SEQ ID NO: 1110 - DNA, 415 bp, Chlorella vulgaris
acctaaggccatcaaggagattaagaagtttgcccagcaacaaatgaagaccagcgacgtgcgcgtggacgtcaagctgaacaaggccgtgtggagccagggcatcaagaacgtgcccaaccgcctgcgcattgtgatccagcgcaagcgcaacgaggacgacgacgagaaggaggagatgttctccctggtcaccctggccgaggaccagagcagcaagggcaagggcgtggtggtcctggaggcataaacacacacacgcgcctcgcggggggagctgccgcagcagccagctggcaagttccgtgcctggggatcgcgctgggcctcgcgtgggccttgcctttcaaacggttggtgtgggcggcgtttctggcggcgtttagggtctcttgcagacccttggtcgttgtgc

SEQ ID NO: 1111 - DNA, 383 bp, Chlorella vulgaris
gaccgacccgtccacggacgcatccgcccacgcgtccggtgcagcctgctgccgggctggctgcctgaagtatgtgtagtggtctgtgtccgctagtgcggtttgtttgtgttgattattattggctgggtcaaccagggcgcctgtctggggcccagtggcattcccgcccctgctctgccgcgccattgtgcggcgtcccctgcaagacaagcttgcagcacaggaacgcatgtgtgtgtgatgctataaacgccaagctgcagcactgcgaggcttatgccgcacaagcggctctacatttgtgcgtcccctggggacgcgtctgttgagtgccttttccccttgatataagagtgcaattcgtgcctgcgagctccggt

SEQ ID NO: 1112 - DNA, 394 bp, Chlorella vulgaris
gcccgcaactgtgtcggcatgctcgtgaacagcttgtatggacgggcctctacctgctggtgggactctcggagagccagtagggcatacgaatgtggtagtatgggaggctatatgtctatggccccctgacaccctggattcatgccatgtaagggaggagaacttgcccagcccttgcaccatataatatttgtttgcgtggtgcggaagcgtgctccttgacgttctccatgtctgtgccgagctgcttcagcacttggtgtactataagtagtagcattggttttcaagacggttgcatgtaccctagtactcagtcactatatgttgcagtgcctctcgtgtgtattaagattgcccagcgaccgtgtattttgctacacccgtgtat

SEQ ID NO: 1113 - DNA, 300 bp, Chlorella vulgaris
acgcatgggcggacgcgtgggtcatagcgggagtacgatctcacagcgcaagttctagcagtcccgccacgggaacttgcgcttcatgcccatgaagcactgcagacataccacaggcaaggtcaagcacttccccaatgatgacgcctccatcgccgctgcacctgcagtcctacatgggctactacgccgccatgacccatatcatccgcgatctgcccaagcctgggtcgaagctgcaccagagcgagacttgcgctccagtgactgtcctcgatacccctcgtatggtggtcgtgc

SEQ ID NO: 1114 - DNA, 420 bp, Chlorella vulgaris
atgccttggctcttcgttcatcgggtgggccggtcaaaaatggcggatcacgaccacgagcacgatgttcacttcgagtctgccgatgccggcgcctcaaagacctatccccagcaggctggtaccatccgcaagaacgcatacatcgtgattaacaaccgtccctgcaaggttgctgacgtgtccacctccaagaccggcaagcacggccacgccaagtgccactttgtgggcattgacatcttcaccggcaagaagtacgaggacctgaccccctcctcccacaactgcgacgtgccccacgtgaaccgcaccgagtacacgctgctggacgtctctgacgacggctttgtgtcgctcatggacgagaagggcaacaccgtggaccacctgacgctgcccaagggcaccgacgagctg

SEQ ID NO: 1115 - DNA, 341 bp, Chlorella vulgaris
cccaagcgtccagtcttgtctcccagctctgcaccatggccgtcgcaatgatgtcctccctgtctcagcgcaacggcctgattgccaaggtgcagaagcagaccggcgttagggctgttgctcgcaccaggaccgtcacaaaggccatcagcgacgttaacctgattgtgggcggttccaccattggcgccctgattttgggcaggagcctgctgcctgtgcaccgcgcataccttgccaaggctggcctgcccaagcagaacggcgtgacccacgtggacgctggcgacaagaggtccgcggaggtcagcttcgctgccaagtccaacgaccctgctggc

SEQ ID NO: 1116 - DNA, 382 bp, Chlorella vulgaris
accaaacgcataggctacaggcagccgcccggacaacgagcggcagctagcaccgacaagctacatcatggcggtcggcaagaacaagcgcctgtccaagggcaagaagggtggcaagaagaagattgtggaccccttcagcaagaaggactggtatgacatcaaggcacccagcgccttcaatacccgcaatgtgggcaagactctggtcaccaggacccagggtaccaagatcgcctcagacggtctgaagggccgtgtgatcgaggtgtccctagccgacctgcagaacaatgaggctgatgcctaccgcaacatcaagctgcgcattgaggacgtccagggccgcaactgcctcaccaacttctacggcatggacctg

SEQ ID NO: 1117 - DNA, 448 bp, Chlorella vulgaris
acgcgtccggaactaaagaacggccgcctggccatggtctccatgctgggcttcttcatccaggccgcagtcaccggcgagggcccctacgccaactggtccaagcatgtcgccgatcccttcggctacaacctcctaaccatccttgctggcgaggaccgcaccccgaccctctgagcaggtggcagcagcagcagcggcggcggctagctcccgagtttggggcaagcctgaggtgcatccctgggacgtgggcgtggcctagggtgtgagcagcggtggtgtactggtagagagcctcgagaagagggggagaactgtgcaaaacgttcctgtgccggcggctctcatttgcgcttgcagcgtggtggtgtcagtgtgagcggcgcatgtagcttcttttgactgctttgtctcattgtcttgggtcgtaaaccctgctcctgag

SEQ ID NO: 1118 - DNA, 456 bp, Chlorella vulgaris
gcgtccgcgaacacgtgggtgcagcaaccatggggcgccgcccagcaaggtgctaccggcaaatcaaggggaagccgtaccccaagtctcgcttctgccgtggtgtgcctgactccaaaatccgcatctacgacgtgggcgcaaagaagtctggcgtcgatgccttcccttactgcgtccacatggtcagctgggagaaggagcacatctcctctgaggctcttgaggcggcccgcattgctgccaacaagtacatggtgaagaatgcgggcaaggacgcgttccacctccgcgtgcgcgtgcaccccttccacgtgctgcgcatcaacaagatgctttcgtgcgccggggctgataggctccagaccggcatgcgcggcgccttcggcaagccctttggcgtggctgcccgcgtcggcatcggccagatcctgctctccatccgctgcagggagc

SEQ ID NO: 1119 - DNA, 424 bp, Chlorella vulgaris
acggtccgtcgattccgggtggcgccacgcgtccgccaaaacgtccgcccacgcgtccgcccacgcgtccgggcaagatggcgcggggcccaaagaaacatctgaagagattgaatgccccgaagcactggatgctcgacaagcttgggggcatctttgcccccaagccgagcgcgggcccccacaagacccgggagtgcttgccgctcatcctgctgctgaggaacaggctcaagtacgctctgacgggcaaggaggtgacgagcatcctcatgcagcgcctggtagaggttgaccgcaaggtgcgcactgacaagacctaccccgtgggcttcatggacgtggtcaccatccccaagaccgacgagcacttccgcctggtctacgactgcaagggccgctttgtggtgcaccgcatcagcaa

SEQ ID NO: 1120 - DNA, 387 bp, Chlorella vulgaris
gggcggttcaagggtgtgacaccactgtggggccgccagattccctacaccatgatgaagtttgctgcctttgagaacgtggtccaagcgctgtacaagtacgtggtgcccaagccgcgcagcgagtgcagcaagacggagcagctgggcgtgtcgttcgctgccgggtacattgcgggagtgctctgcgccatcgtgtctcaccccgcagacaacctggtgtccaagctgaatgcgaccaagggcgtgtccgctggcgagattatcaaggagatgggctgggtggcgctgttcacccgcggcctgccgctgcgtatcatcatgattggtaccctcactggcctgcagtggggcatccacgacgccttcaaggtcttcgtgggactg

SEQ ID NO: 1121 - DNA, 444 bp, Chlorella vulgaris
  unsure (1)..(444): unsure at all n locations
acgcgtccggagagcaangccaangcagccggtggcgcctgtgggccgcctacctctagacagtgggtagcaacgttgggcctggggctggcaccgccagcttgcggcactgattgccacggcggcaccagcatgcggcctgtcttattttgtgccctctagcgccccttccaatggccgtatcgtgtggcggctgctaccagctcaggttgcggtatgcctggtgaggatcacttttggaagcaattaactgtgcttggcgcacctttgctacgtgccccgtgcgctcaggtgcaacatttgtttgtcagttgcttttgctcccatgctccttcccttcacgcctgaccgtggcagcgctgtcgctgggtggacaaactttgtacttatgagtagtgtttgtacctaagtgtctgccaaaaaaatgacacaggcaacaaatgc

SEQ ID NO: 1122 - DNA, 378 bp, Chlorella vulgaris
acgcgtagactggtgttgggctacagggagcataacataatggggattgacctcaaggccgggggccgcaacaagcgggtccacaggaccgcccccaagagcgacaacccctatctcaagctgctcgtgaagctgtaccggttcctggtgcgccggaccgactctgacttcaacaaggtcgtcctcaagcgcctcttcatgtccaagaccaacaggccgcccctgtccctctccaagcttgccaagttcatggccggcaaggaggacaagattgccgtgcttgtcggcaccgtcaccgacgatgtgcgcctgtacgaggtgcccaagctgcgtgttgcggcgctgcgtgtgaccgagacggcccgcccccgcatcctc

SEQ ID NO: 1123 - DNA, 323 bp, Chlorella vulgaris
acgcgtccgcgaacacgtgggcagggtcactggtgaatggcagctgttgccgtcgctacaaacccaggggcgccagcggcagcagcgacagttcttggcttgtgctgtctgctgatgcggaggcggcggccggctggtaggcccgctgcgtctgccctctttctttctccttgcttgctcacgcctacatcctctaccgtccatcctcaagcccatgccagccccttcgttggttgcaccctacgccggaatgggtattgatggtagcttcagtatgagcatgtaatactcaggaccggtatacacaaaaacaaagcagcccg

SEQ ID NO: 1124 - DNA, 111 bp, Chlorella vulgaris
  unsure (1)..(111): unsure at all n locations
cgcgtccgcgctatncataaaaatgagtaactaatgaaataaaaatcattaacgtcactacaaactcaatggtaacaaaaaataacagccaaagttcttggcttgtactgt

SEQ ID NO: 1125 - DNA, 416 bp, Chlorella vulgaris
acgcgtccgcgacaacgtgggcgcgttagcagccgacagccgcacaatatggcggagtcggtgcagaccttcgggcgcaagaagaatgcagtggctgtggcctactgcaagcgtggaaagggggagctgaggctcaatggctcccctctggaccttatccagcctgacaccatgcgctacaaggtgctggagcctgtgctgctcctgggcaagcagcggtttgccaacgtggacatccgcatccgcgtcaagggcggcggccatgtgtctcagatctacgccatccgccgggccatcgccaaggcactagtggccttctaccagaagtacgtggatgagcagagcacgaacgagatcaaagacatcctgctgcaatacgacaggacactgctggtccccgatcctcgccgctctga

SEQ ID NO: 1126 - DNA, 433 bp, Chlorella vulgaris
aacacgcgtccgcccacgcgtccgcccacgcgtccggaaatttaagaaaaactacagcccttataactccagtatatgagaaacaacagaatccaactgtatcaacaaaaacaacaaaaaaaacttcaataactcaagaaaataataaaaaatcgaaaaaaaataaaaagtaaaaaaaaaaaataacaaaaaattttttttgtaattctgttacaataaaaaaactttatggaacttcttttattataaataaatttagctttttttgtagacacttggtatataaaaaaagccaaaagctaaataaaccgctattttttttacagattatcatcttttttacattgtattttatcttttttataatataaaaaagataaaatacaaaagtaaagtaaaaaaactaaaaaaaatatagtagaaaatagcgttg

SEQ ID NO: 1127 - DNA, 413 bp, Chlorella vulgaris
caggatggtgcggatttcggtgctgggcaatgccctgaagactctctacaatgctgagaagcgcggaaagaagcaggtgctgcttcgcccatcctccaaggtggtcatcaagttcctccaggtcatgatgaagcatggctacattggtgagtttgagtttgtggacaaccaccgctctggcaagatcgtggtggagctcaacggcaggctgaacaagtgcggcgtgatctctcctcgctacgatatctctgctgttgagattgaggactggattggtcgcctgctgccctctcgccagtttggctacttcattctgaccacctcccagggcatcatggaccacgaggaggccaggcgtaagaagattgggggcaacgtgctcggcttcttctactgagtgcccagcagatgca

SEQ ID NO: 1128 - DNA, 384 bp, Chlorella vulgaris
cccacgcgtacgagggcagcagcctgtgtttggcaaggcccgctacaccgttcgccagtgggccatccgccgtaacgagaagatctcctgccacgtcaccgtgcgcggggagaaggccgtgcagctgctggaggccgggctcaaggttcgggagtacgagctgcttcgtcgcaacttctctgacagcggcaactttggctttggcatcaatgagcacattgacctgggcatcaagtacgacccctccaccggcatctactgcatggacttctacgtggtgctggagcgccccggctaccgcgttgccaagcgccgtgccaagctctccaaggtgggcgtgcagcaccgcgtgaccaaggatgatgccatcaagtgggtccagac

SEQ ID NO: 1129 - DNA, 370 bp, Chlorella vulgaris
cccacgcgtcagagccgcgcaatggcagtggtcgggaagctggaagagcagctggacttcccccggcctgtgcgcatgcactggacgggctgccccaattcctgcgggcaggcccaggtgggcgacattgggctgatgggcggcccagccaagctgaacggcaaggcagtggagggagtgcggattttcttgggcggcaccattggggagaaccccacgttggcctcggagtttgagaagggggtggcctgtgatgagagcatcctgctgcccaagctgcgggaccttctcattgagcactatggggccaagcccaaggttgctgctcccgccgcagccgtgtgaccgggcgaaagactgacggcatctg

SEQ ID NO: 1130 - DNA, 399 bp, Chlorella vulgaris
cccacgcgtacgatccttgctgtcattctctttcctgctaggtccccaatcctcgtgctgcagcggtcatgttgggcgctgcaaccgccgctaccctccaccaaagcagcctccttgctcatagatgccgtgtccggcttcaaagccggcggtgcagcggcaaggtgtttgcgccaaaagcctccagcgacagcaacagggagggcagcagcgttgactgggaccaggcatggagcaacttttctcagaatgccggggccaagattccagaggttgagagcagggtgtatacgcaggcaccgaggttcgcggagcgcaggacctggaacgtgggccagcagcaggagagcattagacggcaggagcgatacctcctcaactactggtcacaggacacgt

SEQ ID NO: 1131 - DNA, 384 bp, Chlorella vulgaris
gcgtccgcgaccatgcccaggtcgcagcccaggaagtacgcagcccaacaacttcctgggctgcgtacttgcccaggtcgcagcccaggaagttgttggggaaggtgcaggtgacgtcaagttcattgcagacaagaagaagaccctgtgccagggcaccgagcccggcctctgcgctgacgacatgaacgccaccaagtacaccacccggcgttgaaggggagtgccgtgccgcagcggaggaggaggaggaggaggagggaaggaggagaaagcgacgtggctagggcggcctgccgcgtgttgctcgggcaagtgcactggcggcctcccatgggtgggctggcaaccgggaccggcacgatgaccctcactttttgcaat

SEQ ID NO: 1132 - DNA, 443 bp, Chlorella vulgaris
cgtccgccacacgtccgaagagggacggtttgctcgccatcacctacccctcccacgatgcaggcactcggcatgaagaccgccctggcgggtcgcgtggtggccaccaagcaggccacccgcagcgcagcccgttcctccgtggtggtgagggctgagcgccctctgtgggcccctggtgtggcgccccctgagtacctggacggcactctggcaggtgaccgcggctttgaccccctgggcctgtgtgcggaggcaaagatgcgcacctggtaccagcaggcagagctgcagaacggtcgctgggccatgctgggcgttgctggcatcctcggccaggagatcctcaaccccaaccagttctggtataccgctggcatgcccgagaacgtgcccgatctgtactacggccccaacggcgtgaacctgggaggcctcctggc

SEQ ID NO: 1133 - DNA, 431 bp, Chlorella vulgaris
acgcgtccgctacagtcagcgtgcagaaggcttccttcgcgaagccggccctcaaggcctcctgctccaagcgggtggcagtggctcgccccgtgagctgctctgctcagaatgagaaggccaccgccgtggctgccgccgctctggccgttgcccttggctttggccaggttgacgctgcctatgccgacgttgcaggcctgaccccatgcgcggagagcaaggccttcgccaagcgcgagaagaatgaggtcaagctgctgacaaagcgcttgaagcagtatgaggccgactctgcgcccgccctggccctccaagccaccattgacaaaacccatgcccgctttgagaagtacgccaagcagggcctgctgtgcggcactgacggcctgccccacctcattgcggaccccggccttgcgctccgctac

SEQ ID NO: 1134 - DNA, 452 bp, Chlorella vulgaris
cgtccgcaaacatcaagggcaacaaggtgcccaatgaggagatgggctaccccggcggcatcttcgaccccctgggcttcagcaagggcgacttcaagcagatgaaggagaaggagatcaagaacgcccgcctcgccatggtcgcctttgtgggctttgtcatccaggcgcaggccaccggcaaggggcccctggccaacattgccgaccacgtgtccaaccccttcgcccagaacatcaccaagaacattggcaactgcatgatccccgagtccgtcgacatccagggcctcacactgccgctcttctgcctgtggcccggctcccactgagtgcctagtatgtactgccgctggggagcagtaccattacctggtggtaccgccctgctgcagctcgtcgtttcatttacctaacgagaagaatacaaacacgtttccaagccgctgctc

SEQ ID NO: 1135 - DNA, 404 bp, Chlorella vulgaris
  unsure (1)..(404): unsure at all n locations
cacgcgtccggagaccaacagcagtagaagacgagtcatatgcgcagcagtacgggcagacaggctcagagtattttccccgtccaagatcaatgtgtttctgagggtggtgagacgacgagaagacggctatcacgacctggcctctctgttccatgtcatcgacttgggggatgagatggagtttgaaaggctgcccggagctaccagggacgagctcagttgcaacgtggctgacgtgcccaccaatgactccaacctggtcatcaaggcgctgaacctgttccggcgcaaaaccggcgcgtctgacttctaccgcatcgacctggagaaggtcgtaccgcacggggccggcctgggaggcggcagcggcaatgctgccnacacgctgtgggccgccaacg

SEQ ID NO: 1136 - DNA, 406 bp, Chlorella vulgaris
agagcacgcgtccgataagacctgccgccatgggtcgtatgcactccaagggcaagggcaagagccgctcggctctgccctacaagcggagcccgccctcttggctcaagatttccagccaggaggtgaacgagctcattggcaagtttgccaagaagggcctgaccccctcccagatcggtgtgctgctgcgtgacagccacggcgtggcccaggtcaagtctgtgaccggcagcaagatcctccgcatccttaagggccagggtttggctcctgagatccccgaggatctgtaccatctgatcaagaaggccgtgtccatgcgcaagcacttggaggccaaccgcaaggacaaggacgccaagttccacctgattctggtggagtcgcgcatccaccgcctggc

SEQ ID NO: 1137 - DNA, 394 bp, Chlorella vulgaris
cccacgcgtcagagacaccatcccacggtgcttgggatagctgcaggggtgtcaagcaggcatccgcaccatgcctttcaagaggtacgtggagattggccgtgtggccatgattaactacggccctgagtacggcaagctggtggtcatctcagacgtggtcgaccagaacagggccctgattgaccggcccgacgagacccgccgtgtggagaacttcaagcgccttgcaatcactgacttcaaggtggagattccccgcctggccaagaagtccgtgctgaagaaggccctggaggaggctgatgtgttcaacaagtttgctgctagcgcctggggccagaagctggccaagcgtgccgccaaggccgaccagactgactttgaccgctac

SEQ ID NO: 1138 - DNA, 361 bp, Chlorella vulgaris
cccacgcgtcacgagtgttagtcccgtttgggttaaagttgctttcaccgtccgccagaacacaaaatgaagctggtcgctgcttacctgctggctactctgggtggcaaggatgcccccaccgccgaggacatcaagtccatcctgtccagcgttggtgctgaggccgatgaggagcgcctgagcaagctgctttctgagctggagggcaagaacatcaacgacgtggttgcctccggcctgtccaagctggcctctgtgcctgctggcggagttgcctcttcgggcggtgctgcccccgctgctggcggcgctggcgctgctgaggctgctgcccccaaggaggaggagaaggttgagg

SEQ ID NO: 1139 - DNA, 451 bp, Chlorella vulgaris
gcgtccgccatgatgttgggctacagggagcataacataatggggattgacctcaaggccgggggccgcaacaagcgggtccacaggaccgcccccaagagcgacaacccctatctcaagctgctcgtgaagctgtaccggttcctggtgcgccggaccgactctgacttcaacaaggtcgtcctcaagcgcctcttcatgtccaagaccaacaggccgcccctgtccctctccaagcttgccaagttcatggccggcaaggaggacaagattgccgtgcttgtcggcaccgtcaccgacgatgtgcgcctgtacgaggtgcccaagctgcgtgttgcggcgctgcgtgtgaccgagacggcccgcgcccgcatcctcaaggcgggcggcgagatcctgacctttgaccagctggcgctgctggcgcccaccggctccaacacagtgctgc

SEQ ID NO: 1140 - DNA, 383 bp, Chlorella vulgaris
cgcgtccgggcacggctgccgcaccagcattccagctcacgactgggaagtcttactgcagcaccgaaccgtgcatgtcggtcttgggcgctctctcggcggcccttggccggtctaggcgattgccgcacaagggcttcaccctgctgacctccaagcagggccccaagaacttctataagggcaagggcgcagcaagtaccggcaagcatactagcagaggaggctaccaaatacagcaggccaagctcccagactatgtggtgcctgacctgcgagggttcacattgaaaccgtatgtagcttatgacccggcagcagctcccatgaagtacacccagcctcgcagcggcagcctcaccggtgggggggttggcatggcc

SEQ ID NO: 1141 - DNA, 416 bp, Chlorella vulgaris
gcgtccgccaacacgtccgcccacgcgtccgatataatcgaacgatcaatgtaggccccggcaacctgctgacctggtagcaaacatggtgctccatgctacacttgagcaactgcctacgctagcaagatgcttcgccacccacgctagcaagcaagctcccaaagtcggggcagggatccccggggtgcagcacatcatcgcggtggcctcggggaagggcggggttgggaagtccacctgcagtgtcaaccttgcggtcgccctggccgagcacttggggctgctggtgggcttgctggatgcggacgtgtatggacccagcatccccaccatgatgaatattcgagggaggccttcagtggacgaggacgagcgcatgctgccgctggtgaactacggtcttaggtgcatgt

SEQ ID NO: 1142 - DNA, 411 bp, Chlorella vulgaris
agtacctgtccctgtctaccagggtaacccatcagcagggattgaaggccaagaacaatggtcaggcacaacaacgtggtgcccaaccagcacttcaggaagaagtggcaggacaaagtcaggacctggttcaaccagcccgctcgcaagctccggaggaggaatgcccgcgccgagaaggccaagaaggtgttcccccgccccaccgcgggcgcgctgaggcccatcgtgcacggccagaccgtcaagtataacatgaagaagcgcgcgggccgcggcttcacgctggaggagctcaagtggaccaccgccgcaagaacaggtcccttgaggggcttcaggagaatgtgaaccgcctgaaggcctacaaggccaacctggtggtgttcccgcgccgcgccgggaagccca

SEQ ID NO: 1143 - DNA, 444 bp, Chlorella vulgaris
acgcgtccgccaaggatctcaaccgtgctggcagcagctcccgcacgacctctcacccaccagtcctagcgaggttagcaggggttcaccatgaaccaggcaatctatgtctctctgtctctcattggcctggtggccattgtgggagctggtgttggtgttggtagcggcgtggcactgatcagccagcagccgcaggcgaagactgagccaaccaagcactgagtggttagttgctgtggcatacagcagcggcagcagcagcagcagctagtgctggctagcttggggaagttgcagcttttgcaaaggtgcctggccgtgtgcctacctgacggcccgggtttgggagcccgagtgccagttctttgccaatggctggctacttctgtggcaaagggtttggcacaaagtgtcaataaggtctcgggggcgttgctggct

SEQ ID NO: 1144 - DNA, 406 bp, Chlorella vulgaris
ccggggccacccacgcgtccgaggagatgttcgatgccaagaagcacaacctgaacatggagggcgtggagcagctgctggcctctctggaggagttccgcaaggactacaaccagaagcactttgtgcgcaacgagaccttccaggtggcggcggagaagctcaagggccccatccgcaagatttttgtggagttcctggagcgcggctgcacggcagagttctccggcttcctgctgtacaaggagctggggcgccgcctggccaagtccaacccccccctggccgagatcttcaccctgctgtcccgcgatgaggcccgccacgccggcttcatcaataagggcctgtctgacttcaacctggccctggatcttggtttcctgaccaagaaccggcagtacac

SEQ ID NO: 1145 - DNA, 403 bp, Chlorella vulgaris
cccacgcgtacgaccacgcgtccgcccacacgtccgcggacccgtgggaattaaaggcaaaaaaaaaatggtcaagcacaacaacatagtgcccaaaccaaacacttcaggaaaaagtggcaggacggactcaggacctggttcaaccaaacccgctcgcaagctccggacgaggaatgcccgcgccttacaaggccaagaaggtgttcccccgccccaccgcgggcgcgctgaggcccatcgtgcacggccataccgtcaagtctaacatgaagaaacacgcgggccgcagcctcacgctggacgatctcaagtggaccaccgccgcaagaacaggtcccttgacgggcttcaggacaatgtgaacctcctgaaggccttacacgccaacctggtggtgttc

SEQ ID NO: 1146 - DNA, 339 bp, Chlorella vulgaris
ccacgcgtccacgcacgcgtccgcccacgcgtccgcccacgcgtcagcccacgcgtccgatcccccgtcgacaacaggtcgaaggttcacaagatgaagaccctctctgcccgtttcggcgtcggcgcccctgtctccctgtgcaacctcgagttgaccctcgcctccgtggagtggtgctgccccgagcacgcgcatttcatgagcgacctcaccaagcaccgtttggatcttaacggtgagttcgctcgccagtaccgctgggacacgtctgtcctgtccaccgatggcaagacgttccctttccacaggtacgttgacgtgatccaagcttagtgg

SEQ ID NO: 1147 - DNA, 414 bp, Chlorella vulgaris
  unsure (1)..(414): unsure at all n locations
acgaccacgctgtccgcccacgctgtccgcccacgcgtccggttggtgnaagggggnagagccgcaacaaatggcgtcgtgacaacgaaggctcnagaacccncatgcgcgaagatccgcngtcgcgaaagctcatgcctcgaactggctgcacgcggcgaagttctggtgatttcgcctgacagagagggcggcataagggtgncattcgagcagctgaaaccggagcagcacgcctggtgtttctgggcaagggcccgcgtacaccggttcgccgagtttgggccatctcgcnncgtaacgaagaaggatctncctgtccacagtcacgcgtgctgccggggaaagaaggcccgtgnncagctgctggaagggccgggcctcaagggttcgcggaagtacgaagctggcttc

SEQ ID NO: 1148 - DNA, 432 bp, Chlorella vulgaris
acgcgtccgccaacacgtccgggcggcgccagcctcgagggggccggcagcagcagcagggggaggggctgctgtgcgcgtcgtgcgtgctgcggctggccctggtggcgggaagccctggggcgcccctggagctggctcaagctgcagcagctgcggttcaaggagatgatgcgggaggcggagcggaacaaggagtatgcggagcacctggcgcgcagcctggacagggttgtgttctgggtggtgctgctgggctacaacctggccgtcgtcatcatctttgcagtgggggcgcaaggcgagcccacctacgcctttggctagcggtcctaatgttcagcggggccccaggaaggctggacccagcacacggcatgcacttggaatagcctagcggtgtgaggttgggggcttgtcggttggtgtgcg

SEQ ID NO: 1149 - DNA, 419 bp, Chlorella vulgaris
agcatgatggcgcgggcggtgcgcggtccgctgggtgacgtttggccgcagcaccacaggaagcgcagcgcagcctgcatagcgggcagtgaagggtgcttgcatgctgcttgcactgcgagtgcctggactgctcactggtagtgaatccacgttggtgcatgtgttgtcatgcgcttctggaaaggacggttgatgtgctcctcctgaactcccatgcacggccctgccttgaacggatatcagtggccagttcaggagacagtacgcatgtggtaatgctgagattgttgcctttctgaagcttgcaatcttttgttttgcttgcttgtctgctgacgactggtgcgtagtgtgacttgtggtacccttgatcagtggactgagttcatgcaagagatatcaccaaggaaaaagag

SEQ ID NO: 1150 - DNA, 347 bp, Chlorella vulgaris
cacgcgtccgcgagcgcgtccgctccaattttgcctactcccgtgctgtgcgcagctgagaactagtctatctggctcgcatcctgctgctgattttaattgcttcccggtcaaaaaaaaaaaaaaaaaaaaaaaaaaaaaaaaaaaaaaaaaaaaaaaaaaaaaaaaaaaaaaaaaaaaaaaaaaaaaaacaaaaaaaaaaaaataaaaaaaaaacaaaaaaagcaacaaaaaaaaaatacagagggaaataattaaaaaaattccaagacaggaaaaaactagagaaaaaccaaatttaaacagcattgcaaaaaaacacccttttacaaacagggtttaaaaac

SEQ ID NO: 1151 - DNA, 384 bp, Chlorella vulgaris
ggtccacccacgcgtcagagagatttgggctttgcgtttatgcgctgccccttccccaattgaagtgcaacgcgacagtgatggaattggagagggacaggggctgcagcataggagagctgtgacatgcagtggagcttcagctagttgccggttctagttggggccgtttgctgatggaggggtgtagaagaattaattaggggatattctaacgcttgtaccatagccagctttttcaggcagtggagattatgagatgcatctcattctgtgatgtgcaggttgtgcaacaggaactaggtagcaattaaccgccagtgctagtagcaaggtcaccttacgcttgtacgatgtttgcttctccctgtctactgccccctg

SEQ ID NO: 1152 - DNA, 362 bp, Chlorella vulgaris
agatcgtggaatcccccgtcgacaacaggtccaaggttcacaagatgcagaccctctctgcccgtttcggcgtccgcgcccctgtctcccggggcacccgccaggtgacccgcgcctccgtggagtggtacggccccgaccgcgccaagttcctgggccccttcaccaaccccccttcctacctgaagggtgagttcgctggcgactacggctgggacacctctggcctgtccgccgatcccgagaccttctcccgctacagggaggttgaggtgatccatgcccggtgggccatgcttggcgcccttggctgcgtcgtgcccgagctgctggaccgcaacggcaccgtcaactttggcgag

SEQ ID NO: 1153 - DNA, 455 bp, Chlorella vulgaris
acgcgtccgccatcacgcaatagttccagggcaatcactatgcaggcaaccatgatgaagaccttcggcgccagcctgcgcaaggctgtgcccacccagggcaagggcacccgccaggtgacccgcgcctccgtggagtggtacggccctgacagggccaagttcctgggccccttctctgagggctccacccccagctacctgaagggcgagttcgccggcgactacggctgggacactgctggtctgtctgccgatccccaaaccttcgctgcctaccgcgaggttgaggtcatccatgcccgctgggccatgcttggcgccctgggctgcctgacccccgagctgctgcagaacgccggcgtggccagcttcggcgacgctgctgtgtggttcaaggctggtgcctccatcttcggcgatgatggcctgaactacctgggcaacccctccct

SEQ ID NO: 1154 - DNA, 429 bp, Chlorella vulgaris
cacgcgtccgcaacaagtctgacggaggggacagcccgaaggccgccgaggcccccgccgccgccgcggctcccgcccccggcgagcccatggacatcaacaccgccatccagctggtgctcaagaaggcgctggctcacgacggcctcgcacgcggcctgcacgaggcctgcagggccattgagcgcggccaggcgcagctgtgcatcctcgccgacgactgcaaccagcccgactacaagaagctgattgaggccctgtgcgccgagcagagcgtcaacctcattgccgtgcccgaccccaagaccctgggccagtgggcaggcctgtgcaagattgacagcgagggcgaggcgcgcaaggtggtcggctgctcgtgcgccgtggtcaccgactacggcgaggagactgagggcctggcggtgctgc

SEQ ID NO: 1155 - DNA, 359 bp, Chlorella vulgaris
cgcgtccgcggacgcgtgggcggacgcgtgggcggacgcgtgggcggacgcgtgggttcgtagccagtgcttccataatgggtagtggaaacggagcctgataggctgaaagtctgcgcactgccgtgaagtggcaagtccttgtcagcctttcgcagcaccaaagttgaatgattggacataacctgtgcctcaaatctgcaatgccgtcagtggggctgcctcagtcgtgtgtaacaccctttagtaaagactatgcaccgaagcagagcgtcaagctcattgccgtgcccaaacccaaaaaccctgggccaatgggcaggcctgtgcaagattgacagcaagggcgaggcgcgcaa

SEQ ID NO: 1156 - DNA, 440 bp, Chlorella vulgaris
cgtccgccacacgtccggcagtttgagcgggccaggcagcgggtgctacagagcgtggggggcgacatacaggaaggagagaagtacacagtcagggtgacccggctgacagactttggcgccttcgtggaattccccaccggcgcacgcaccctgctgcacatctcagaggttgcgcccaccaagatacgcagcatcgatgacgtggtcagcgtgggcgacagcgtggaggtgctgtgcctgggtagggacgcccgcggcaacatccgcatctcacgcaaagcccttctggcagagcagtagtagaattcttcgattcaaagggcggctgcttttgcacccgccatgcggtgtgtgtttatgactgcagggctgggccttgtagattgtgctagtctctctgcaaaagcccttgtgcagtgtgtcttgagtagccttgc

SEQ ID NO: 1157 - DNA, 360 bp, Chlorella vulgaris
aggacccaagcgcaaagcaggtgggacagcccttagcactgcaaaagcctccaagaaggcgaaagacgaggctctcaaagcgactgacagccctaaggactcgccagtgaccatcaccgtggaggcctgcaagtcctgaggcgtgtttaagcggcgtgctgccgagctcgagaaactccttcttgagcaggcccaggacgtcgctgtgcaagtgaacgctgagaagcctcgcaagggcacctttgaagtgcgccacggcaacaagacctatgtatcgctgcaggcaatgccacgccctttcaagaagctaagggagctggacttggaggccttggtggcagagctcgtggatgacctgcg

SEQ ID NO: 1158 - DNA, 373 bp, Chlorella vulgaris
aaaagcgtcgccatggcttcaaaaaggaagggcggcgttggtggcaacaagttcaggatgtcgctgggtttgccagtggccgcaacaatcaactgcgctgacaactccggcgccaagaacctgtacatcatctccgtggccggctggggcgccaggctgaaccgcctgcccgccgccgcccccggcgacatggtgatggccaccgtgaagaagggcaagcctgacctccgcaagaaggtgcaccctgcggtggtggtgcggcagcgcaagtcctggaggcggaaggacggcacctacatctactttgaggacaatgcaggcgtcattgtgaaccccaagggcgagatgaagggctccgctattaccggccccg

SEQ ID NO: 1159 - DNA, 439 bp, Chlorella vulgaris
gtccgccacacgtccgaagaaggaggcgcccgctggcgagaagcccgagccggtgcgcacccacctgcgcaacatgatcatcatccccgagatgatcggctccgtcgtcggcgtgtacaacggcaagaccttcaaccaggttgagatcaagcctgacatggttggcacctacttggctgagtactccatctcctacaagcccgtcaagcacggcaagcccggcattggtgccacccactcctcgcgcttcatccccctcaagtgatgggtctgttctcagagccctttggaaatggcagcggcggcggcgggagcggcagcacgaacagcagcaggcccagcagcacagccattgttgatagcgctgatgtggcggggcgtggaaggtggcaggcaagggagtggagccagctgcgtgcctcagttcgagcaggcggct

SEQ ID NO: 1160 - DNA, 458 bp, Chlorella vulgaris
cacgcgtccgccaacacgtccgcccacgcgtccgaagacagaaggcttcttttgtaatactcagccctaccgttcaaggtcctcgcaagtgatgtgaggagtggtcatcatttcttggagtctaacggaggcgaggagctgtggcaagactttaaacagcttggtcagaattgccaaaaagaatgccgggcatgtatagcgcaccgttcttcaacgccaagaaccttttggagagggagtcactggggaagttcctaggagagctggatgccctttcaggcccattagcgggaccggccaagccgccggagctggtcaaatttagcaccaccgacacagtggggcatgcaatgcggcaactggcggcttacaacgttctggcggccccagtgagcgacgctgctagtggggaatatgtgggcatgatcgacgtggcgggactgctcaagggactcata

SEQ ID NO: 1161 - DNA, 452 bp, Chlorella vulgaris
acgcgtccggcacaatgggccatgcttggcgccctgggctgcctgacccccgagctgctgcagaacgccggcgtggccagcttcggcgacgctgctgtgtggttcaaggctggtgcctccatcttcggcgatgatggcctgaactacctgggcaacccctccctggtccatgcccagtccatcgtggccaccctggccgtgcaggtcatcctcatggctcaggctgaggctttccgtgtgagcggcactgccccctggagcggcgaggagctcgacaccctgtaccccggtgatgcctttgacccccttggcctggctgacgaccccgacacctttgctgagctcaaggtcaaggagatcaagaacggccgcctggctatgttctccatgttcggcttcttcatccaggcacttgtgaccggcaagtctcgcctggagaatctggccgacca

SEQ ID NO: 1162 - DNA, 389 bp, Chlorella vulgaris
atcaagttggccttgagccgacgcgtttgacgcccgcagcagcacctaacacacgcaccaggcaccatgctcatctccaagaagaacaggcgtgaggtgtacaagttcctcttcaaggagggtgtgctgtacgcggagaaggacttcaacctgccggagcaccccgagattgagggggtgtccaacctggaggtcatcaagctgatgcagtccatgaagagcaaggacttggtcagcgagcgctatgcctggcgccactactactggttcctgacggacgcgggcatcgagcacctgcgtgagtacctgaacttgcccagcgagattgtgcccgccacactgaagaaatcgaccaggcctctggagcgggagggcgcacgcccgccgcg

SEQ ID NO: 1163 - DNA, 414 bp, Chlorella vulgaris
aagatgaagtacgctaaggaggtggacaacgccaccaaggccgccaaggcccgggggtctgacctccgcgtgcacttcaagaacacgcgcgagtccgccgcagccatccgcggcaagagcctggtgaacgccaaggcgtacctggaggctgtcattgatcacaagcgctgcatcccgttcctgcgctacaatggtggcgtgggccgcaccagccaggctaagaatgagggcaacaagatcggccagggccggtggcccaagaagagctgcgagttcctgctgggcctgctcaaaaatgccgagagcaatgcagaggtgaagggcctggacacggacgccctgtacgtgtctcacatccaggtcaacaaggcgcagaaggggcgccgcaggacctaccgcgcacacgggcgcatc

SEQ ID NO: 1164 - DNA, 431 bp, Chlorella vulgaris
cccacgcgtacgaccacgcgtccgcccacgcgtccggttaaagttgcctgccggttctcgacccggtctggtcctgctggtgaacagtgcacaatgccgtctgccaccaagctcgtcaagaaggaggcgtacgacgccaagctgtgcgagctgctggacacccacaccaaggtgttcctagtccatgccgacaatgtgggctccaagcagttcatggatatccgtgcggccatccgcggacactccaagattttgatgggcaagaacacgctgctgcgccgctgcatccgcctatactgcgagcgcaccggcaacgaccactggctgggcctgctggactacctggtcggcaatgtcggcctggtcttcacccagggcgacctcaatgaggtgcgcacgcaaatcggtgagttcaaggtgggcgccccggc

SEQ ID NO: 1165 - DNA, 436 bp, Chlorella vulgaris
cgtccgggactagtcttccgcaagccaaaatgccgtccataggcttttaccgcaactatggcaagaccttcaagaagccccggcgccccttcgagaaggagcggctggatgccgagctgaagaccgtgggcgagtacggcctgcgcaacaagcgcgagctctggcgtgtgcagatggtgctgtccaagctgcgctccagggcccggtccctgctgaccctggacgagaaggaccccaagcgcctttttgagggtgaggccctcatgcgccgcatgtaccgctacggcttcctggacgagacccagaacaagctcgattacgtgctggcgctcaaccctaccgacgtgctggagcgccgcctgcagaccctggtgttcaagctgggccttgccaagagcatccaccacgcgcgcgtgctcatccgccagcgccacat

SEQ ID NO: 1166 - DNA, 431 bp, Chlorella vulgaris
acgcgtccgccaacacgtccggttatggaaacgacttaagtttttcaagcttgggtgcctggggggattctttcttcttgtcctcccgtattgtcttcttctgtccgttgctctgctttgttctgcgtgctatggacagatgcccagaatctctccgcaacttagttgccctgtatccaatgcggaaattgactgataaataaagccatgccttgcattttgccagacgtgtggtgcaaattctgaatgcaatctcgttctgtgggcgtgctgacttgagaacaaaaccacttatgggatccgcttaatggccggctgttgaatggccacatagcgaagttaaggatgacctctgagagtttgctttgagtttctttgtagccaacaaaagtattttcggggcagcagtgccactgtttttcacgtttttg

SEQ ID NO: 1167 - DNA, 452 bp, Chlorella vulgaris
gcgtccgccaacacgtccgcccacgcgtccgcgagacgctcgccccttctcggaagcaggtcaccaccatgcagaccgccaccatgcagaagtccttcgtgggcaccagcgtgaaggcccaggccccccgtgcccgccagaacatgagcaccgtggtggtggcttcctccggcaagaagattgacctgaacaagcagggcatcaactctgtcgagaaccccattgtcaagctgaacctgcgcggcgagagcaagagcatgcagagcaaggactgggtggacccccagggccgcaagggcaagggctttggcgtctaccggtttgccaacaagtatggtgccaacgtggatggctactcccccatctacacccctgacacctggtccgagtctggtgacagctacaagcttggcaccaagggcctcattgcctgggctggcctcattgttgtg

SEQ ID NO: 1168 - DNA, 420 bp, Chlorella vulgaris
actaacctcccatctcgtgcggctttcgcctttgaagccggcagcaggtcaccatgggtcgcgtcaggaccaagaccgtcaagaaggcttctcgtgtcattatcgagaagtactataaccgtctcaccatggactttgacaccaacaagaggatttgcgaggaggtggccattattcagtccaagcgcctgaggaacaaaattgctggcttcaccacgcatctgatgaagcgcatccagcgcggcccagtgcgcggcatctccctcaagctgcaggaggaggagcgtgagcgtcgcatggactacatccctgacgagtcggccatccagaccgacgcgattgaggttgacaaggacaccctggagatgctccgcggcatgaacatggccaacctgcccggcatcagcgttgtgcagcccc

SEQ ID NO: 1169 - DNA, 428 bp, Chlorella vulgaris
acgcgtccgagaaaccaactgaacgcttggctagtgcacgtctttttgccaccaccaactcgtcaacatgaacctgaacggccaggactgggactcggtggtcatccgcaagaaggcgcccacatccaaggacgcaaagtcggccaccgcagttaaccaggcgatccgagcatgcgcccaggtggagacgttaaagaaatttgatgcgggcagcaataagcacggctcgggtcccatcaagcatgcgaccaagcttgaacaggaaacagaggtgtttgagcacgagcatgtgtcaactgagctgaagaagcatatccagcaggctaggatagcaaagaagctcacgcaggcgcagttagcacaacttatcaatgagaagcctcagatcataaacgaatatgagaacggaaaagccattcccaatccgc

SEQ ID NO: 1170 - DNA, 400 bp, Chlorella vulgaris
cccacgcgtacgaccacgcgtccgagacgctcgccccttctcggaagcaggtcaccaccatgcagaccgccaccatgcagaagtccttcgtgggcaccagcgtgaaggcccaggccccccgtgcccgccagaacatgagcaccgtggtggtggcttcctccggcaagaagattgacctgaacaagcagggcatcaactctgtcgagaaccccattgtcaagctgaacctgcgcggcgagagcaagagcatgcagagcaaggactgggtggacccccagggccgcaagggcaagggctttggcgtctaccggtttgccaacaagtatggtgccaacgtggatggctactcccccatctacacccctgacacctggtccgagtctggtgacagctacaagct

SEQ ID NO: 1171 - DNA, 445 bp, Chlorella vulgaris
cccacgcgtccgaccgctcggctctgccctacaagcggagcccgccctcttggctcaagatttccagccaggaggtgaacgagctcattggcaagtttgccaagaagggcctgaccccctcccagatcggtgtgctgctgcgtgacagccacggcgtggcccaggtcaagtctgtgaccggcagcaagatcctccgcatccttaagggccagggtttggctcctgagatccccgaggatctgtaccatctgatcaagaaggccgtgtccatgcgcaagcacttggaggccaaccgcaaggacaaggacgccaagttccacctgattctggtggagtcgcgcatccaccgcctggcccgctactacaagaagaccaagaagctgccgcccaactggaagtacgagtccgccaccgcctccgccctggtcgcataagctgtgttcaa

SEQ ID NO: 1172 - DNA, 442 bp, Chlorella vulgaris
acgcgtccgacttcctggccatgcagcgcaagctgctgccagagacgttcaaggccaactgaaaggtggtgaactggcggaggatggccggcaacgtggcacggtagcctggggaggaatgctggcaagggacattgcccaggcttgctgaaggttggctggccgggccgcagctaccaccaggggagcttctcgcagctgtgggctttgtgcggtaggccatgacttcccccgcccacgtgccggccgtcccacagcgcctcctgcgctgttggcttttggtggcgtggggctgctggtggctgtgcctgtgtgtgtgctgcgttggtgggctttcatttcatatttgatctgtcacttggtgagtcagccttgctcttgcccgctgtgtgacctctaactcatgaaaatgctggggttgagtgtctgtgcgatgcaattt

SEQ ID NO: 1173 - DNA, 450 bp, Chlorella vulgaris
cacgcgtccgccaacacgtccgcccacgcgtccgcttctacagtcggccaacatggttagccgtctgagcaagaaccgcaagaagcgcggtcatgtcagcgccggccatgggcgtatcggcaagcacaggaagcaccccggtggccgcggtaacgccggtggccagcaccatcacaggattatgatggacaagtaccaccctgggtactttggcaaggtgggcatgcgctacttcaacctgaagaagaacaagttccactgccccatcgtcaaccttgacaagctgtggagccttgtgggcgaggaggctcgtgttgaggcctccaaggactcgagcagcgctgccgtgattgatgtcaccaagtatggcatcttcaaggtgctgggcaagggcgagctcccgcagcagccagtggtggtgaaggccaagtttgtgagcaagctggcgga

SEQ ID NO: 1174 - DNA, 382 bp, Chlorella vulgaris
  unsure (1)..(382): unsure at all n locations
acgcgtccggcaatgatgcacctggtangaaggtgcttggagcagtgtgatgcagtggccaaagcgccactagaacaacaagactgccattccggcggggctatcacacaggtgctcaagacattagcagacgcctccagggagctgcangatgtggcagcagaagccgaaggtggacaggcagcaagcggggctgatgagccagttgccaacggcacagctgccattgcagctgcaggccaggaaaacgggctttgtgagcatgangggggcttcagcgatgaagatgctgacctggcgttccaagcgctcacagcacagcaagccgaggtggtgcgtagcgtgcatgccatgctggtctcagtcagcaccctgctcaaag

SEQ ID NO: 1175 - DNA, 438 bp, Chlorella vulgaris
ttcccgggcgcccccacgcgtccaggatgacgtggcgcgcgcccgcaaccagctcaaggcctccatcctgttcagccaggacgggaccaccggcgtggccgaggacattgggcgcaacctgctagtatacggccgccggctgcccaaggccgagctctttgcgcgcattgacgccgtggacgcccccaccgtcaagaacgttgcaggccgcttcattctggaccaggagcttgctgtgactgccatgggtgacacccagtttgtgcctgactacaactggctgcggcgccgcacctactggctgcgctattagttacgcagcccaacaataggcctcccaatgtagcttgggcaggagccttgtgtaaagcctcgtaaacatttgtttgcggtcgagccacagctaacgcagcggccggctggtggtactggggcatc

SEQ ID NO: 1176 - DNA, 368 bp, Chlorella vulgaris
cacgcgtcaaatacagagtaccacaagctgctggtgacccgcatcaaggaggagcgggagcgcaggtctgagtctctggcaaagaagcgtgctctgcgtactgcttcccaggcctccaaggaggcataagcccctggcagatatgggagacttgtccagcagggatggcagtgtgcggggcccggagcagcagcattgacacagggggacttagtgtgggccttggctggatgcacgagctgcctctcggcggggtttgagagcctgctggcaagcttgtagtcagctcagtggccctgtctggcagcagcttgtaaaagcagacacgtgaaaaaaaacgacagaaactcagaaagagaacggacaac

SEQ ID NO: 1177 - DNA, 476 bp, Chlorella vulgaris
  unsure (1)..(476): unsure at all n locations
gtccgagcccctacagcaaaagatccacgatgcagaccgcctttgtccgctccggcctccgtgccgccgtcaccaccgctggcaagggcacccgccaggtgacccgcgcctctgtggagtggtacggccctgaccgcgccaagttcctgggtcccttcaccaaccccccctcttacctgaagggtgagttcgctggcgactacggctgggacacctctggcctgtccgctgatcccgagaccttctcccgctacagggaggttgaggtgatccatgcccggtgggccatgcttggcgccctgggctgcgtcgtgcccgagctgctggaccgcaacggcaccgtcaactttggcgagaacgccgtgtggttcaaggctggtgccgccatctttggtgatgacgggctcaactacctgngcaacccctccctcatccacgcacagtccatcgtggccgtgctgccctcccagattgtg

SEQ ID NO: 1178 - DNA, 306 bp, Chlorella vulgaris
atgcatatcacttgtactgtggtccaaatttccactattggcactgtccacggaaaggggcgcatctgtatggggggcgaaggtggtgtcttcatatccttgttccttgctcattggtttggtcctgattgggcatatgggctcaccaaagggttatggctttttccttgctgtacttcttcacaccgtacagtcaacggagagcggctcgccgtatcagatgctagtacctcgggagctgtgcccgcaagtggtttgacatcggagcgtatttccactcgtttgttcgtgtcctcaccatcaatt

SEQ ID NO: 1179 - DNA, 369 bp, Chlorella vulgaris
gtccgctaacgcaagacctcaacacagacaagacgctcaaggaggcgcgctttgaccgccactttgtgcgcgacctgacctggtctcggcaccagctggaggagctggcggagcggcgctttttggcggcgcagcagcagcggcaggcgcagcagcagctgtacgccagcccggggggcggcggcggcggcgagaacgggggcaccaggtcggcctacacctttgcggacctgttcaaggcggtgaaggtggaggacttctcctcgtacctcagcaagctgtccacgccgcgggagctcatgatcatgatgactgagatgatggctcgcatggaggcccacccggagggtggcctcacagcccaggaca

SEQ ID NO: 1180 - DNA, 465 bp, Chlorella vulgaris
cacgcgtacgcgaacgcgtgggcggaggtggcccaggccggcttcatgactgtgcgcctggcgttcctcattagcctgctggccaccttccccctccagatgacccccttccgcgactccctctggaagctgctcttccgccaggagctgcaggggcccgggttttggctggtgacctacctgtcgctggtgtgtgtgtacctggccgcctccgccatcacatccatctgggagccgctcatgatcatcggctccaccgcaggtgtgctggtggcgtttgtgttccctggggcgctgggcatggccatgggcgaggaactcaccgagtccaccacctcacgcacctcccggggcatcactggggcggtcctcatcatcgtgggcatcgtcatcggtctggcgggcatcatccgtgtgattgcgtacaacggacctctggctgggctaatgggatgctgccaggcc

SEQ ID NO: 1181 - DNA, 433 bp, Chlorella vulgaris
cacgcgtccacgagcgcgtgggcggacgcgtgggctccaacatcactgtgtctccccgataagcgggcggcacacctggccgagcgacggtggctgcagcagccaactgcaacacaggcagtcggtgatgccagctgctatggtgggcaggggcggggcatgagcgcagtccatcagcatgtgtagcagctgggggtagcagcttgctgttgctgtgtatctatctactagggtgcgtgctgtcgtgttatgatgatgccagggggagtcgcggcatctgtggcagcagcaattggtgtgtaggggccgccaggctgggtggaatcccagctggccggctgcgattttgtagctggatcctgcagcatttatgatactgcagcaggaccattggcaggctagcttgtccacgtctgctataacgagaagatta

SEQ ID NO: 1182 - DNA, 376 bp, Chlorella vulgaris
tccgccaacgcgaccgctgagatcaagtttttgagcaaggagcaggagggcaacacggagaacttcaaggacaaggcctcggggcaggacctggacgtggtggacaagatgcccatgctggagtggcttgccaacacctacaagaagtttggttgcacgctggagtttgtgacaaaccgcagccaggagggcagccagttctgcaagggctttggcggcgtcggcggcatcctacggtactcggtggacactgcggagtttgatgagccagatgacgacatggatggcgactcggacgggctctggacatcggacgaggacatctaagcgtgaagagggagagcgatgactgttgtcagggttgaggagacatgcc

SEQ ID NO: 1183 - DNA, 440 bp, Chlorella vulgaris
  unsure (1)..(440): unsure at all n locations
cacgcgtccaatacgtatgtggaaaacgttatgtttataaactgaaggaaggattgggtggcagctttgggtgtttgagtctgaacattttggtagatccgcgccctcagaagggttatgcgcgtgctctagcaattggctgtaaggcacgtcttcggcgatgattttattctggggtgtgacaccccgcaagtgtactgaacctagcttcaagatagagaagacccttgagcgtgcaacttgtctgtctgtattggaaaatgctatatgcattgaatggctgtgctatcgctgagcattgtgcaatgccgtggctttgtgtatgcccggggttcagatgtgtattgtgatattgaggtcatctgtgtttgtatccatgtgaagtttcagggctggtgttatgtagtcatgtntttaaagccgacagcacaaaagggaaa

SEQ ID NO: 1184 - DNA, 248 bp, Chlorella vulgaris
acgcgtccactagcatctgttgcaaggtagttgagacaacaatatagacagtgtctgaaacagagagcctgcagccgctatcatagatgagtcgatataccatgcaacgatctggactcgagagtcagccccagttcccgcaagatgaggttcatcggattcaaggttgttttgaggttgttctgaagcatgtctatatgtcctagcctgtaggggcgatcatgtatgattccatgcattatgcattt

SEQ ID NO: 1185 - DNA, 471 bp, Chlorella vulgaris
tcccgggcgcccccacgcgtccaccacgcgtccggttcaaccagcccgctcgcaagctccggaggaggaatgcccgcgccgagaaggccaagaaggtgttcccccgccccaccgcgggcgcgctgaggcccatcgtgcacggccagaccgtcaagtataacatgaagaagcgcgcgggccgcggcttcacgctggaggagctcaaggaggctggcattccctccaagcttgcccccaccattggcattgcagtggaccaccgccgcaagaacaggtcccttgaggggcttcaggagaatgtgaaccgcctgaaggcctacaaggccaacctggtggtgttcccgcgccgcgccggcaagcccaaggccggcgatgccagcgcggaggagctcaaggcggtcgcgcagctcagcggcccggtgctgcccgtcacacgcgctgcgcccgctctggagaaggttgccatcaccg

SEQ ID NO: 1186 - DNA, 473 bp, Chlorella vulgaris
  unsure (1)..(473): unsure at all n locations
gtccgccaaaccatccgaacaaccccacgctgcggcgcctcattgccatgcgcaacccacacatggtaccgatcaacgtcctgcacgtggagatcctgcggcggctgcgcaaggagcccaccagtagcatgctgcgcgacgcactgctgctcaccatcaacggcattgcggccggcatgcgcaacaccggataagcttgggtattacacaaacagccagggcagcagtttacgaggcgctagctgtgtacgcctgctagaaggtacgtctggttcagcggatgggcctatctatccacgcttcctgctgtggagaatatctggggcgggagattggcagccagtaaccttgcttcaagtcacttcttgaaagttcagcagtcttgcagtgatattccacgtccctttanggacttgtgttggacttgccatgggcgacatcaaatcatttccgataactgcaaatcctccctg

SEQ ID NO: 1187 - DNA, 476 bp, Chlorella vulgaris
gtccggaaaaggaccctctgtaaccgaaagagtcaaaggcagacacaccatgcaggtgcaagccctcttcaagaagcttggcggcggtgcccccgctaaggcagccaagaaggccgccggtgcagccaagaaggccgttggcaacgccaagaaggtcgcctctggcaccaccaagggtggctggctgggcactgacagcaacaacatcgacctggacaggtggtacggccctgaccgcgccctgtacctgcccggtggcctgctggaccgctctgaggtgcccagctacctgaacggcagcctgcccggcgactatggctacgacccccttggtctgggcaaggatggcggcctggagaagtaccgcgccaacgagctgctgcacgcccgctgggccatgcttgccgctgcctggcgccatcatccctgaaggccttgccgccaatggtgccgatatcaagggcgccacctggtac

SEQ ID NO: 1188 - DNA, 427 bp, Chlorella vulgaris
gtgggcggacgcgtgggcggacgcgtgggctggcatatggtggacgcaggactttcatccctccagacatggtgtagggcagggcctgcaaatttggaaactaatgcgttttcttaatgaaacttctgttattagtatgggtgagaggtaatgcgaagagggagtgagagctgggctatactgaacaggaccggatgtgagcaagcctgagtcttgcctgagttctgagccagtagttctctccccggtggtcgtgtttgctggcttctctttccgggaaggtgcatgccatcaagtattgacttgtggtttgtgggcatggtacattctaggcttttgttggccccacttgtaggtatcacggcagcacggtcgcgcggcggtacgctcatggactagactttgttctagcttaagcgacggcaaa

SEQ ID NO: 1189 - DNA, 451 bp, Chlorella vulgaris
acgcgtcagccaacgcgtccgggttattaccggcccttacatcaagatgggtcgtgtcatccgcgcccagcgtaagggtcgtgggtcggtgttcaagtcccacaacacccacaggaagggcgcagccaagctgcgcgtcctggacgccgcagagcgcaatggctacatcaagggcgtgattagcgacatcatccacgaccccggccgtggcgcacccctggccaaggtgactttccgccacacccacaagtacaagcacgacaaggagctgttcatcgcccccgagggtgtgttctctggccagtacatctactgcggcaagaaggccaccctgaccattggcaatgtgaagcccgtgggcgacatgcccgagggtaccatcgtgtgcaacgtggaggagaaggctggcgaccgccgctcactggcccgctgctctggcgactacgccatc

SEQ ID NO: 1190 - DNA, 152 bp, Chlorella vulgaris
acgcgtacgccaacgcgtccggttggtttttggcaagccagctgcagtagcacgttcaatgcggaaaaactcatgttgtgggagcaggggagcgtgcatgtgggagagtaaggcagggtgacagcagccactggctggcagccaagtaacac

SEQ ID NO: 1191 - DNA, 400 bp, Chlorella vulgaris
acgcgtcagccaacgcgtccggggggagagccgcaaaaatggcgtcggacaagaaggctcagaaccccatgcgcgagatccgcgtcgcaaagctcatcctcaactgctgcaccggcgagtctggtgatcgcctgcagaaggcggcaaaggtgcttgagcagctgaccgggcagcagcctgtgtttggcaaggcccgctacaccgttcgccagtgggccatccgccgtaacgagaagatctcctgccacgtcaccgtgcgcggggagaaggccgtgcagctgctggaggccgggctcaaggttcgggagtacgagctgcttcgtcgcaacttctctgacaacggcaactttggctttggcatcaatgagcacattgacctgggcatcaagtacgacccctc

SEQ ID NO: 1192 - DNA, 451 bp, Chlorella vulgaris
cacgcgtccagtagaatcccccgtcgacaacaggtccaaggttcacaagatgcagaccctctctgcccgtttcggcgtccgcgcccctgtctcccggggcacccgccaggtgacccgcgcctccgtggagtggtacggccccgaccgcgccaagttcctgggccccttcaccaaccccccttcctacctgaagggtgagttcgctggcgactacggctgggacacctctggcctgtccgccgatcccgagaccttctcccgctacagggaggttgaggtgatccatgcccggtgggccatgcttggcgcccttggctgcgtcgtgcccgagctgctggaccgcaacggcaccgtcaactttggcgagaacgccgtgtggttcaaggccggtgccgccatcttccgcgatgacgggctgaactacctgggcaacccctccctcatccacgca

SEQ ID NO: 1193 - DNA, 449 bp, Chlorella vulgaris
gtccggtagaataccccgtcgacaacaggtccaaggttcacaagatgcagaccctctctgcccgtttcggcgtccgcgcccctgtctcccggggcacccgccaggtgacccgcgcctccgtggagtggtacggccccgaccgcgccaagttcctgggccccttcaccaaccccccttcctacctgaagggtgagttcgctggcgactacggctgggacacctctggcctgtccgccgatcccgagaccttctcccgctacagggaggttgaggtgatccatgcccggtgggccatgcttggcgcccttggctgcgtcgtgcccgagctgctgggacgcaacggcaccgtcaactttggcgagaacgccgtgtggttcaaggcccgtgccgccatcttcggcgatgacgggctgaactacctgggcaacccctccctcatccacgcacag

SEQ ID NO: 1194 - DNA, 465 bp, Chlorella vulgaris
ttcccgggcgcccccacgcgtccacaccgcgtccgctcgtggaatcccccgtcgacaacaggtccaaggttcacaagatgcagaccctctctgcccgtttcggcgtccgcgcccctgtctcccggggcacccgccaggtgacccgcgcctccgtggagtggtacggccccgaccgcgccaagttcctgggccccttcaccaaccccccttcctacctgaagggtgagttcgctggcgactacggctgggacacctctggcctgtccgccgatcccgagaccttctcccgctacagggaggttgaggtgatccatgcccggtgggccatgcttggcgcccttggctgcgtcgtgcccgagctgctggaccgcaacggcaccgtcaactttggcgagaacgccgtgtggttcaaggccggtgccgccatcttcggcgatgacgggctgaactacctgggcaacccct

SEQ ID NO: 1195 - DNA, 455 bp, Chlorella vulgaris
cacgcgtccagaacaccatcccacggtgcttgggatagctgcaggggtgtcaagcaggcatccgcaccatgcctttcaagaggtacgtggagattggccgtgtggccatgattaactacggccctgagtacggcaagctggtggtcatctcagacgtggtcgaccagaacagggccctgattgaccggcccgacgagacccgccgtgtggagaacttcaagcgccttgcaatcactgacttcaaggtggagattccccgcctggccaagaagtccgtgctgaagaaggccctggaggaggctgatgtgttcaacaagtttgctgctagcgcctggggccagaagctggccaagcgtgccgccaaggccgaccagactgactttgaccgctacaaggccatggtccagaagattaagcccagcgcacaggttaggaaagctttcaaccagctgaag

SEQ ID NO: 1196 - DNA, 469 bp, Chlorella vulgaris
cccgggcgcccccacgcgtccagcagcagccatggtgtcgttgcggcttcaaaagaggcttgcagcctccgtcctgggctgcggcctcaggaaggtgtggctggaccccaatgaggtcaatgacatctccatggccaactcgaggcagaatgtgcggaagctagtgaaggatggcttcatcatccgcaagccagagaagatccactcccgtgcccgcgcccgggcgtcagcggaggccaaggctaagggcaggcacaccggctacggtaagcgccgcggtacccgcgaggcgcgcctgcccaccaagatcctctggatccgccgcatgcgcgtgctgcgccgcctgctcaagaagtacagggatggcaagaagatcgacaagcacctgtaccacgagctttacatgaaggtgaagggtaatgtgtacaagaacaagcgtgtgctcatggaggccatccacaagcagaag

SEQ ID NO: 1197 - DNA, 468 bp, Chlorella vulgaris
cgtccgcaaagttagccccctgctctgctgggttctgctgtcccttgaagtctcttggtggccaggtaaaagtaccatcatgcagccggccatgttcaccagcaccagggtggcgtctgccaggcccagcgtggccgtgaacgccaagaaggccgccgccaagaacgcaggcaccggcactcgtgtgggcggtgctggctacaggcagtacagcggcgacgctttgtggctgcccaacaccactcgccctgagtggctggacggctctctgcccggcgaccgcggcttcgatccactgggcctgtccaagcccgctgagtacctgcaggtcgacctggactccctggaccagaacaaggccgtgaacaaacccggcggcgttgtcggcaagttcaactccgtctcggacgtcgtgtccgaggaccgcctgtccccctactccgaggtctttggcctgcagcgcttccg

SEQ ID NO: 1198 - DNA, 460 bp, Chlorella vulgaris
  unsure (1)..(460): unsure at all n locations
ccgtccggtaacttacaccgtccgccagaacacanaatgaagctggtcgctgcttactggctggctaccctggttggcaaggatgcccccaccgccgaggacatcaagtccatcctgtccagcgttggtgctgaggccgatgaggagcgcctgagcaagctgctttctgagctggagggcaagaacatcaacgacgtggttgcctccggcctgtccaagctggcctctgtgcctgctggcggagttgcctcttcgggcggtgctgcccccgctgctggcggcgctggcgctgctgaggctgctgcccccaaggaagaggagaatgttgaggaagatgaagaagaggacatgggcttctccctattcgactaagcgcacggcggaacgcacagcggagaagggtcctgtgatgcctctgaatctagccgtgtaagaatctccctttcagtgacaatctggc

SEQ ID NO: 1199 - DNA, 460 bp, Chlorella vulgaris
gtccggcaaggaacagcccgacgcggacgagtgcagggtgtttgacgactgaagctacggcttaacggcgcttaaccagcaaacccccctgtatccggaactgcaattgcggcctggccttgctccctgtaccatgattcccgctctgcaagtggtggcagcaagagagcttggggcagtcggccttgacaatatggtagcagcagggcagcctaaccctcggcgttgtcactgcgctgcctcgcggttgagagcggcctgtctgatctttcattctgaacgattcagtgcatggcaccggcgtcccttgtctgtgctgtgtgttgtcaagccaaggcgcccagtgcatctgctatcactgcctgcctgcctgtgcaagtcacagcgccgtttgaagctcagaaattcttttagcaacccatgagaagattacctactgttgtgtaaccttgacatcggc

SEQ ID NO: 1200 - DNA, 476 bp, Chlorella vulgaris
cacgcgtacgccaacgcgtccgcccacgcgtccggcacaggatggctgcccttcagcgcgcctttgcgggcctgaggtctgcagtgctcagcaggatgggcatggccgctagcagccagcagctatggcgaggatttgccacagcctcttatctggacaaaaatgaggttacagaccgcgtgctcaattgtgtgaagaatttcgagaaggtggagcccagcaaggtcaactcctcggcctctttccagaaagaccttggcttggacagtctggacactgtggagctggttatggcactggaagaggagtttgctatcgagatccctgacagcgaggcagacaaaatcttgtcctgcagcgacgccatcagctacattgcagcacaccccatggccaagtgagagccctgcagctgacgttgataagtgggccgcgctgctccttggccatgggaactgcatttccgttcaacatcc

SEQ ID NO: 1201 - DNA, 445 bp, Chlorella vulgaris
acgcgtacgagaagttgagtttttaagtagtggagggagtgccaggcttctgaaggactttcagtagacttgactactggctcgcgctcacgaaaatggcgaccacaacatacacactcgctgagtgccaggagcacactaccgagaaggactgctggctaataattgagggaaaggtctacaacgtgacaaacttcctggacgagcacccaggcggctatgacatcgtggttgctgcggccggcaaggatgccaccgagtcttttgaggagatcgggcacagcaatgccgccaagcagatgctcgctgactattggatcggcgaccttgcgggcgcggacgctagcgcggccaagagtgcagtccaacctaaggccggaggccccgccactcccggcagcagctcctttggcacgcttatcaaggctctcctacccctgatcat

SEQ ID NO: 1202 - DNA, 437 bp, Chlorella vulgaris
cacgcgtcagcgaccgcgtgggcggacgcgtgggcaacttcattgttgttccgtccagatatacaaggtcacctgtgagatgggtcttcaggaggacttcaacaaggctgccgaggaggcgaaagcccttccgtccaacacgagcaacgatgaccagcttgcactctatggtctcttcaagcaggccaacgtgggcgacaacaccacaagccgtccaggcatgtttgaccttaagggcaaggccaagtgggacgcctgggataaatgcaaaggtatgggcaaggaggaggccatgcagcagtacatcatgaaggtgcaggagctgaaggagaagtatgcataggaaagaagtggtgggcagcaagccgcatggccgatccagccgggcagtgagcagaagcactgtgcagctggtgtccgttggccaagttttcctg

SEQ ID NO: 1203 - DNA, 469 bp, Chlorella vulgaris
tccgggcgcccccacgcgtccaccaccgcgtccgcggacgcgtgggcctgaacctccctgcttgtgtgcgtagcctcagcagacatgcagacctccatgctgaagcctgcttccagccgggtggccttccagcaggccccccgccccgccagcgctgctcgccgcgtggtaacgtgcaatgcccagggcgtgagcgccttcaggaacttcgtggagaaggccgggaacgctgctgcagtgctggctgcgaccaccatcaccgtcaaggaggagtcgcagttcaagggcggcgagactgacttcgttgccaccaagctgatgacccgcctgacatacaccctggatgggatgaccggggagttcaagattgacggcagcggaaacatcagcctgaaggaggaggatggcatcgactcggcccccgtgacggtgcagcttcctggcggcgagcgtgtgcctttcctgttct

SEQ ID NO: 1204 - DNA, 398 bp, Chlorella vulgaris
gtccgcttacggaaggttccagctgcccgaacagctggccgccacgttcctggtgacagagggaccgtcatgcagattttcgtcaagaccctcacgggcaagactatcacccttgaggtggagtcttcggacactattgagaatgtgaaggctaagattcaggacaaggagggcatcccccctgaccagcagcgtctgatcttcgccggcaagcagctggaggacgggcgtaccctggccgactacaacatccagaaggagtccactctgcacctggtgctgcgcctgcgcggcggcatcatcgagccctccctgcagatcctggcccgcaagtacaaccaggacaagatgatctgccgcaagtgctatgcccgccttgcaccccgcgctgtgaactg

SEQ ID NO: 1205 - DNA, 160 bp, Chlorella vulgaris
cacgcgtccactatcgcgtgggcggacgcgtgggcggacgcgtgggaaaaaaaaaaaaaaaaaaaaaaaaaaaaaaagtaaaaaatattaaataataataaaaaattaaataaaaaaaaaatagaaagggggatagttttaatagttttactttaattta

SEQ ID NO: 1206 - DNA, 444 bp, Chlorella vulgaris
ccacgcgtccagcacggcaggggcacactaatggctgacctgctgcgcggcacttctgccttcaagcccttctgccgggccctggaagtggatatggttgaaatcagccctgtgctcaggcgactgcagtgggaggctcttcaatgtggcccagcatatagtgaggaaagcatgattggtaccagcgcttacaacggagtgcaggtgcagtggcaccggtccttggacgaggtggccacagacctacccacagtgtacattgcacatgagttctttgatgcgctccccgtgcatcagttccagagaacaggtcgagggtggtgtgagcggctggtagacattgcctccccggacagccccctgcagctgcgccttgtgctgtcaccggggcccacaccagcgtcgcgtttgcttgtgcagcggcggcttgaaggcctgcctgct

SEQ ID NO: 1207 - DNA, 421 bp, Chlorella vulgaris
  unsure (1)..(421): unsure at all n locations
gtccgccaaaccatccgcccacgcgtccgccgtcctgggctgcggcctcaggaaggtgtggctggaccccaatgaagtcaatgacatccccatggccaactccaaggaaaatgttccgaaactaattaaagatggcttcaacaaccgcaagccaaaaaagatccactcccgttcccgcgcccgggcgtcaacggatgccaaggctaaaggcaagcacaccggctacggtaagcgccgcggtaaccgcgaggcgcgcctgcccaccaagatcctctggatccgccgcatgcgcgtgctgcgccgcctgctcaagaagtacatggatggcaagaagatcgacaagcacctgtaccacgagctttacatgaaggtgaacggtaatgtgtacacgaacaagcgtgtgctcatgganggcatccac

SEQ ID NO: 1208 - DNA, 306 bp, Chlorella vulgaris
gtccgccaaaccaatcgcccacgcgtccgccgtcctgggctgcggcctcaggaaggtgtggctggaccccaatgaggtcaatgacatctccatggccaactcgaggcagaatgtgcggaagctactgaaggatggcttcatcatccgcaagccagagaagatccactcccgtgcccgcgcccgggcgtcagcggatgccattgctaagggcatgcacaccggctacggtaatcgccgcggtacccgcaaggcgcgcctgcgcaccaagattctctggatgcgccgcatgcgcgtgctgcgactcct

SEQ ID NO: 1209 - DNA, 390 bp, Chlorella vulgaris
gtccgacaagttaccagggtttaaccaggctaggttgaggtagtgcttacagcagacaggagctctgtagctgtgatctgtccgtgcggcgtgcaatatagatgagcgtggtaagttgttgcttgccattgctacgtgtgatgttccacgcacctgctggtgggtctagcaaattgtcttttttcagctgcgacgtggacaggtatgagtgcatggggttagccttgcaagacccagtagtttgtacggccttaggcaggggtttggctcatgcgtttccaaactcttgcgatgtgatctcatctaaaagggctgctgcaaaaaaaaaaaagctcaccggcaacgcgttgaccagcgagtaacattaaaaaaaaaaggggggccccccta

SEQ ID NO: 1210 - DNA, 438 bp, Chlorella vulgaris
acgcgtcagggatggagtggttgctatataaaaccaagccgatggggtcggcaagtgaaaccgtgcatctcttgctgtcggatatcgcttccatagatggccacagcttgtggttcagcctgttttggggcctgttggcgctatgcatactgcaggtggcaaactcttcttacacgcggcgaaggctggtgaagcaaagacagctgctggcaaggttgacagctgagaatgctgaattgaaactgaatcagcgggtgcgggaccaggagcacagtgaggttgtgaagcggctcaaacacgagcagacggtggtgctgaagaaagtacagcaactagagtctatactggagaaactgtaacaccttcttgtgagaatgttgtgactgtattgatctattgcttccgctgttccagtaccaattcttcgatttacttccc

SEQ ID NO: 1211 - DNA, 426 bp, Chlorella vulgaris
acgcgtcagccatcgcgtccgatcgatggtggcatgaccatgtgctaaacaagcgcccatggcctgggcagccgcttggctggggcagcgccagcttggtgactaggtcgcctatgtacccataatccccacatgtcacagatttcattcttattggtgagggtggcaggtagtgcattcttatggttgcacattgttgccgtggttggcaaagtaaaacagcgattgtgtggtctaaagccagtgcaatgttgctggtccaacagtcagtggcagcttgataatgttagtgctgtggtagtgctggggccctacgtacgtgattgtttcaatatattgtcccgcacttggagttttggtgtactgttgcatccagattgaatcctgtcgagcttccttcttccttctcgcacaccacaccccttc

SEQ ID NO: 1212 - DNA, 476 bp, Chlorella vulgaris
acgcgtaaggcaggccctatgggcgcctccggggtcaagcgcctggcccgcctgggtatggtgtctgatgcccccggcatgtctgccctcgacatgaacacagccgaggacatgattgttgaccgcacccgggaggtggttcccggcatggtcatctgtggcatggaggtggctgagctggacggctgcccccgcatgggccccacctttggcgccatgttcatgtctggccagaaggctgcccatgtggccctgaactccctgaggaggcagcaggagcgggagtcggcctctgaggcaacccctgctggcaagcagttgactaccgcctgagtgaagcgcactgtgtgatgcccgcgggattgcatgttggaggttgtagtgtacatgtgatgaagcctagctacacgtatcaatttccatagacttggctcgtgatggcactacctccgaacatatgtacagggtgctgttag

SEQ ID NO: 1213 - DNA, 423 bp, Chlorella vulgaris
cacgcgtcaggcattgcccactgcatacccacgacgcaatggcagcccaggcagcgctcagcaaggtcttcgtggccaggcctagccaggcccgcgtggctcgccgtgccagcgtgcaggtgcacgctgccagcaggcctacctggtatcccggcgcaacccccgccccttggcttgatggctctttgcccggcgactacggctttgaccccctgggcctgggcggcggcagcaaggagacccttgactactttgtgggcggcgagatcatcaacggccgctgggcgatgcttgccgtggtcggcattctggcccaggagctgctgggcaagggcccctggtggaccgcgggagcccgggtcgagtctggctttgacctgaagaccctgatcgccattgaggtggtgttctttgccgtggctg

SEQ ID NO: 1214 - DNA, 405 bp, Chlorella vulgaris
cacgcgtccaggatggcgtagtcgtgatggaggcccaggagcgcttgtgtgtctcatgcgctagggcctgttggaggtctcgagttcgagtagtggtgtgggtggtggtgtgcctgaaaggtgtctagatagtgtgaatatcgtgccattgatgcagctcgctgtggagtattgctatgggtgtgcagggctgcttctgtacagcctgcctgcctggggcaggaaatcccttgatggtcgcgcaaggcaagcttgtgggtgtgtactctgtctcgtgttggtgtgtaggggtgggtgttggtgttggggtgctgtccttcccctcttacatgtttgatgtccaagaacagtttgcctctttttccgtcagtcttacccccatttgcatttgcatgtgtaacaggg

SEQ ID NO: 1215 - DNA, 430 bp, Chlorella vulgaris
ccgtccgggagcggacaagatggtgcagcgtctcacttacaggcggcgtcacagctacgccaccaagtccaacaagcagcgcctggtgaagacgccaggtggcaagcttgtgtatcagctgctcaagaagccgagctccatcccgacttgcccgatcagcggtcagaggctgaacggcctgcccgctcgccgccccgacaccctctctcgcatcagcaagtcaaagaagaccgtccaccgtgcttatggcggccacctcagccatgctgtcgtgaaggagcgcatcatcagggctttcctggtggaggagcagaagatagtgaagaaggtgctcaagctgcagaaggccaaggagaaggcagctgaaaagaagaagtgagcagcggcagcgcagtgttgtcgttggcagcagcggacagcgagcagctgc

SEQ ID NO: 1216 - DNA, 325 bp, Chlorella vulgaris
cacgcgtccagtagaatcccccgtcaacaacaggtccaaggttcacaagatgcagaccctctctgcccgtttcggcgtccgcgcccctgtcgcccggggcacccgccaggtgacccgcgccgccgtggagtggtacggccccgagcgcgctaaattcctgggcccattcaccaaccccccttcctacctgaacggtgagttcgctggtgactacggctgggacacctctggcctgtccgctgatcccgagaccgtcactcgctacatggatgttgaggtgatccatgcgcggtgggccatgcattgggccctttgatgcgtcatg

SEQ ID NO: 1217 - DNA, 140 bp, Chlorella vulgaris
cacgcgtccacgaacgcgtgggaaaaaaaaaaaaaaaaaaaaaaaaaaaaaaaaaaaaaaaaaaaaaaaaaaaaaaaaaaaaaaaaaaagaaggaagagggaggaggttcaagaggttttaggtttgcgtgcaagtgggg

SEQ ID NO: 1218 - DNA, 436 bp, Chlorella vulgaris
  unsure (1)..(436): unsure at all n locations
gtccgccaacgcatccgtatgtgggatagttccaagggagcagacatacatgatcctcaagaggttgatcaagggaacccaggactacttgaagcgagtgcaaaacccctacccagaggcccagcagacactcttccagttcagcagcccagctgacttggctctgtggaacatcttctcagacgcagagtacgggggcaagtccacagcggagcttcggctctctgaggaggtgccgggttcggcagagctgtgtggccagttcagcacccaggtggcggatgagggtgcacatgagccgctgaagcgcagcggcttctgtggcatacacagcaaggaaattaagggctacctagatttggaggattttgacactttagtattcagggtccgangagatggacgacagtaccttgccaacctacggacagaaaac

SEQ ID NO: 1219 - DNA, 436 bp, Chlorella vulgaris
ccgtccggtaacgcattagttccagggcaatcactatgcaagcaaccatgatgaataccttcggcgccagcctgcgcaaggctgtgcccacccagggcaatggcacccgccaggtgacccgcgcctccgtggagtggtaaggccctgacagggccaaattcctgggccccttctctgagggctccacccccatctacctgaagggcgagttcgccggcgactacggctgggacactgctggtctgtctgccgatccccaaaccttcgctgcctaacgcgaggttgaagtcatccatgcccgctgggccatgcatggcgccctgtgctgcctgacccccgagctgctgcagaaacccggcgtggccagcttcggcgacgctgctgtgtggttcaaggctggtgcctccatcttcggcgatgatcgcctgaactacct

SEQ ID NO: 1220 - DNA, 265 bp, Chlorella vulgaris
acatcaagatgggtcctatcatcgcacccaatgcttaagggtcttgggtccgttttaaagtccgccatgaccaacaagaagggcgcaaccaacctgctcatcctctaagccgtaaagtgcaatggctatatacagggcttatttatcgagatcattcactaacggcgccagtggcacaccacttgaaagggtaattttccgccaaacacagatgtgaaagtactacaatgagcggttcatcgcaccccatggtgtgttatctgga

SEQ ID NO: 1221 - DNA, 462 bp, Chlorella vulgaris
acgcgtcaggcagcacgccaggccaagcccgcactcagaggagtgcgacgcatgtccagcggcaacgttgactacgcgcttgaggctaaggaggctagcaagtggaaggtggtgagcttcgcggctctgccaatcattgtaggcatgaccatttatgacttcgccggatcccacccccactttgaggagaaccccgcctacccttacatgcgcatccgcaacaaggaattcccttggggcgacgagaacctgtttgtgacgaagaagaagcactaaggtggacctgggcaccccagacgtagcagcaaggccaaggcagccggtggcgcctgtgggccgcctacctctagacagtgggtagcaacgttgggcctggggctggcaccgccagcttgcggcactgattgccacggcggcaacagcatgcgggctgtcttattttgtgccctctagcccccttcc

SEQ ID NO: 1222 - DNA, 395 bp, Chlorella vulgaris
acgcgtcagctagttgctgttcttagtcaagcagtgcctatctaccctcacaccgcagcctcacaagcagccatggccggcaaggaggttatccgtgcggcccagatgtttacaaagacgggccaggccagcaaggtcagcgtggtgaaggagattgttattggcacggtcctgggcactgcgctgggcatgtggtggcagacgtggcattggtcagagaacaagaagtgggaagatcattacaaggcgcttgcggcccagaagtgagggacttgttggctgctggttagagcgcctgtctctgcaaggtctgcttacggtggagcggcatggaatgttcagggtcagcttgggagtctgggctagaaagacgtggatagaggccgcagctgcag

SEQ ID NO: 1223 - DNA, 324 bp, Chlorella vulgaris
acgcgtacgccaacgcgtccgcggacgcgtggggatcgagcgcgtggcaaaggccaaccgctaagcgccttctcacatcatgtctgctggcgcgcaatgagagcttggagctggggaggagcagcggcgctgttgtagatctggcgtgggcgggggtgttggagggatgcaggcgggcggcgttgccgcgcctgctcgtagagctgcagccgtttcatgcatgctggtaggagcatcagtacatggcgcatgctggccagctgtggcgtaggtgtaggcagctggtcaacgtgcgatgtggcttgggagcggcttaccgtgggt

SEQ ID NO: 1224 - DNA, 438 bp, Chlorella vulgaris
acgcgtcaggcatagttctagtggacaagggcaacatgccccgcaccggtgacgtgatgatcctcaagtctgacggcaccctgaagcctgtgaaggacttcaccgcccagatccagaccctggacatccccggcgaggtcaaggccggctactcccccatcggctttgtgcggtgtggccgcgccgcctgcaggatctccaagatcaactggaaggttggcaaggagactggtggcaagaagctggaggagccccacgggctcaaggccaacgagatggccgaggttgtgtttgagccctgccagccgctggtcgtggacagcttcaagaactgcgagggcctgtcccgcatcgccttcctggacggcaacaccgccgtcatgcttggcaaggtggtggccacctccgccaaatgagcatagcagcagcagcagccgt

SEQ ID NO: 1225 - DNA, 256 bp, Chlorella vulgaris
acgcgtccacaacgcgtccggccgctccacaaacttgtgtaccctgttgtagcctgtccacgagaggccctggaactgcaattttcctggctttgattttgctgcccctttgctttgccagttcattgggctggaatagtccacgctctattcagtttattggaaatgaaggacgccttgcagttgtggtgtatgaggtgcaaatcaaagcaggtgtaacaccagcagcgcgcaaaacaaaatgtggcaagtccgc

SEQ ID NO: 1226 - DNA, 452 bp, Chlorella vulgaris
cacgcgtccaccaccgcgtccgcccacgcgtccggcggtctgtaaggcgcattgccagaagccagcgtccgccgggcaaaacaagccaccatgaggaacgacgctggcgagattgtggatctgtacatcccacgcaagtgctcgtggaccaacaagctcatcacggccaaggaccacgccagcgtgcaggtcaatattggccacctggatgagaatggcgtgtacactggcagcttcagcacctttgccctgtgcggccaggtccgctccaagggtgaggctgatgccgctatggacctgctctggcagaagaagaaggctgagattggccagcagtgattggagcttgagcgcgggcagcacgctgctgtgcacgctgtgatgccctcggagcaaagcgggcagtgcacggtcatggcagttaccatttggcagccgcatgtgtaacacct

SEQ ID NO: 1227 - DNA, 458 bp, Chlorella vulgaris
cacgcgtccgacaacgcgtccgctggtcgctgggtccaatacagaagcaatcatggcggacgcaggggagcacaaaaagaggacgttccgcaagtacacctaccgtggtgtggacctcgaccagctgctggacctcagcactgacgagctaatcgagctcttccccgctcgtcagcgccgcaggttccagcgcggcctgaagcgcaaggccctggccctgatcaagaagctgcgcaaggccaagaaggaggcgcccgctggcgagaagcccgagccggtgcgcacccacctgcgcaacatgatcatcatccccgagatgatcggctccgtcgtcggcgtgtacaacggcaagaccttcaaccaggttgagatcaagcctgacatggttggcacctacttggctgagtactccatctcctacaagcccgtcaagcacggcaagcccggcattggtgcca

SEQ ID NO: 1228 - DNA, 461 bp, Chlorella vulgaris
ttccggggccaccacgcgtccagatgaggagattcgctccaagtctgaccagttcaggcccttccccttcattctgcgcatgatggccaagcttggcaaggccagcactccctctggcgagtggagccagtgaccgaccgccttgagcagccctgcagcatagcaagcaaagcaggcggtggctgagctgagatacccaactgaccgcactgctcgcgcttgtgtgtgaagccctgcggagggcacccttgactggtagggaggagaggcattgcttagtttcagttgttgcgcagcatagcacggcgtgccccccggctgccttggggccttgagaggccccgcttgtccggcgcgcgtgctttcctttttgcttgtacctccattagcttctttgcttgtatacatgcctttgcaaagagtgtacccatgtcgctaagatcttccggtacccaagtgag

SEQ ID NO: 1229 - DNA, 394 bp, Chlorella vulgaris
  unsure (1)..(394): unsure at all n locations
gtccgccaacgcatccggttatcgaggggacaatgcaggccactatgtcnagggtcgctctgggcagcatcgcgggcctgaggcccgctgctactgttcctcccagggccatgcagacggtggtgagggccatggcttacaagccggcccctggcagcctgcaggttgtagcgcccatcaacggcgacccctacattggcatgctggagacccccgtgacctccgcacccctggttgcctggtacctttccaacctgcccgcctaccgcaccggcgtgtcccccctgctccgcggcgtggagattggccttgcccacggcttcttcctggtcggccccttcatcaagcttggccctctgcgcaacactgacgttgccgacattgtgggctgcat

SEQ ID NO: 1230 - DNA, 476 bp, Chlorella vulgaris
  unsure (1)..(476): unsure at all n locations
gtccggcagggtaatttgcgccagcggccccaaggtcaacatgtcccgtcctcaaccagtgtcnccgaagcaggccatcgactttcttaacctggttcaggcgttgaaaacaccaaaagaacaggctgggtccggcgcaacatacaaggcccggaaagcatagcagaccactcctatcggatgggtctcatggccatgctggttcagggcacaaagtacgattatggcaagtgcctgaagctatccttggtgcatgatgtggctgagagcatcgtaggcgacatcaccccacactgcggtgtgagtgacgaggacaagtttgcccaggaggcagccgcagtgaagcggataaaggagatgctgggcggttcgtctcttgcaggggctgagattgaggagctttggcatgagtatgaggaggcagcaacaccagaagccaatttggtgaaagactttgacaaggttgagatgattct

SEQ ID NO: 1231 - DNA, 425 bp, Chlorella vulgaris
acgcgtacgggagcagcttagcaggaagagccggggggcaggcagcgagtgagcggttcaccatggggctgacgttcaccaagctgttcgcgcggctgttcagcaagaaggagatgaggatccttatggtcgggctggacgctgccggtaaaacaacgattttgtataagcttaagctcggagagatagtgacaaccatccccaccattggcttcaatgtggagacagtggagtacaagaatattagcttcaccgtgtgggacgttggtgggcaggacaagattcggccgctatggcgccactacttccaaaacacccagggcctcatctttgtggtggacagcaatgaccgtgaccgtattggggaggcccgggatgagctgcatcgcatgctaaacgaggacgagctccgcgactcggtgctg

SEQ ID NO: 1232 - DNA, 242 bp, Chlorella vulgaris
acgcgtcagccaacgcgtccgcggacgcgtgggtgctgctgtatgtgtgaaaggccatatgatactgcgcccccttgcgcgggctggctatatatgtgggctgagggccctgtgcattatgtagctgccccctttttattccagatgatgtcacaattttgttatctagtgtgccaaataggcatgtagttccaaacaatgagaggctgcacagcaacgaacccttgcagatgtaaggttcc

SEQ ID NO: 1233 - DNA, 453 bp, Chlorella vulgaris
acgcgtcagccaacgcgtccggccagataaggcgagaggagaggaggtacgggtatactgattgctttggtgggccattttctgcctgcttgttgccctggcttagatgcgggtaggcaatagagatcctggacgtaagcactgcccggcatcagcacatgcccgtgcgggctcctcaccattcacaggcacggagagtgagcccagctgcaggattgacttcgtccagcagcaagcggtgttcacatgccgggggaagctgtgtatgtacatgtgggacgcatgcaagattgccggtgcgaaggtatgcttgtggttgaaggatgtcttctaggggcgagggatcagtcaagccccacctgcatcttgtcatccttcaaacactcgcctgtgttgcgttaacagttgaagttgcttcctgggttggctaacaagctagtttcatcctattat

SEQ ID NO: 1234 - DNA, 466 bp, Chlorella vulgaris
ttcccggggggccccacgcgtccacgagcgcgtgggtgcaacctgtaggtgggagttggttccagcatcgcagcgcatttaagtggcaggaatggcaatagtttatgggctatagatcattacactcatgcttgagtagcagaagcagcctttcgtcccatacccaaaccaggcttttgccaggacggtggcagcacaccaataagtgcctcccgtgatgaagcctcttctggtacttggcgccctgctgtgtgcagctctgctgccccaggcacatgcctacgaactggacatggtctttcagacaaagtgtgtcatggaggaggccaacgagcagcagcacgtcacgggcagctattcggccttttcgaaggatgagcacaagacgccggtgcccgtggacgcacggatagaggaaccggaggggcatgtggtgtttgagaagcagggccacaccaactctgac

SEQ ID NO: 1235 - DNA, 472 bp, Chlorella vulgaris
gtccgagcatgaatgggcgccgctacgaggttggcgactttgcgaccgggctggcagtcctgccaaaagcgctctccctagtagtgtggcaactagccagggacctggtgcattgacggccgtggctcgctaagtcaccactcctcgttgacttggggctgcacagaagcaggcaccatgacgaacttgttcgagccagcggcactgttcatcatgttccgtgaggccctcgaggccgcggtcattgtggcagtcatgctgcagctgctgaacaagctgaacatgcggcacctcaagagatatgtctggataggagcgggggtagggcttctcatcgccatcattataggtgttgtattttgcgtcatcttctacgtggccaacaacaagatcttcagcggcgatggagagctcatattcaaaggggttatcagttggataaccggcctaatgataacaatcgtcgccttcg

SEQ ID NO: 1236 - DNA, 398 bp, Chlorella vulgaris
cacgcgtccaccacgcgtccgagcgattcgaactaacgcctatccgaggcttcctcgaagacagaagacatcaacatgtctgacggaggggacagcccgaaggccgccgaggcccccgccgccgccgcggctcccgcccccggcgagcccatggacatcaacaccgccatccagctggtgctcaagaaggcgctggctcacgacggcctcgcacgcggcctgcacgaggcctgcagggccattgagcgcggccaggcgcagctgtgcatcctcgccgacgactgcaaccagcccgactacaagaacctgattgaggccctgtgcgccgagcagagcgtcaacctcattgccgtgcccgaccccaagaccctgggccagtgggcacgcctgtgcacgat

SEQ ID NO: 1237 - DNA, 247 bp, Chlorella vulgaris
acgcgtccgcaccgccccacagcagtgcggcttttcctggaggcagcagcacgcagcggcatagacccggcccgggtctcggcctttgcgtgggatgcagcggagcctgcctgtggcgccggcgcgctgaccggccctacaatgccgagagcatcagtagcagaactgcagccaggggcatcgagcaatgggcatgattttccctctccggcctcaggagtcgccgctatcactggcactggttgtg

SEQ ID NO: 1238 - DNA, 465 bp, Chlorella vulgaris
ccggcgccaccacgcgtccaccaacgcgtccgcccacgcgtccgcccccaggacatcatcgccatctccgcccgcccatatggccagcgcgccgtgctcaagtttgcgcactactctggcgccaaggctaccgtgggccgccacacccccggtaccttcaccaaccagatccagaagggctttgaggagcctcgcctgctgatcaccactgacccgcgcaccgaccaccagtccatcaaggaggccgcctacatgaacatcccagtcatcgccttctgcgacaccgactctgacctgcagggtgtggacgtggcgatccccgccaacaataagggcaagcactccattggcatgctcttctacatgctcacccgcatggtcctgcagatgcgcggcactgtgtcggctgccaacccctgggacgtgatggtcgacatgttcttctaccgcgagccggaggaggcc

SEQ ID NO: 1239 - DNA, 383 bp, Chlorella vulgaris
gtccgccaacgcatccgcccacgcgtccggccagtgccgctgactgcatccgcacgcgtgtcttgtctcccagctctgcaccatggccgtcgcaatgatgtcctccctgtctcagcgcaacggcctggttgccaaggtgcagaagcagaccggcgttagggctgttgctcgcaccaggaccgtcacaaaggccatcagcgacgttaacctgattgtgggcggttccaccattggcgccctgattttgggcaggagcctgctgcctgtgcaccgcgcataccttgccaaggctggcctgcccaagcagaacggcgtgacccacgtggacgctggcgacaagaggttcgcggaggtcagcttcgctgccaagtcaacgaaccctg

SEQ ID NO: 1240 - DNA, 457 bp, Chlorella vulgaris
  unsure (1)..(457): unsure at all n locations
cgcccacgcgtcngacctccttcaaccgcaactttgccgcgcgcaatgacgccaaccccgccacccacgcctttgtgacgtccccggagatcgtcaccgcctttgccatcgcgggggacctgaccttcaaccccgagaaggacaccctggtgggtgctgatggcaaggagatcatgctggagcctcccagcggcgacgagctgccgcagcgcggctacgacccgggcgaggagacctaccaggcccccgccggcgcccaggccaacgtggtggtggaccccgcctcgcagcgcctgcagatcctcacgccctttgacaagtggaacggcaaggacctggaggacgcgctggtgctgatcaaggtgaagggcaagtgcacgaaccgacacatctccatggcgggcccgtggctcaagtaccgcggccacctggacaacatctccaacaacatgctcat

SEQ ID NO: 1241 - DNA, 461 bp, Chlorella vulgaris
cacgcgtcagcgaccgcgtggggtggaatcccccgtcgacaacaggtccaaggttcacaagatgcagaccctctctgcccgtttcggcgtccgcgcccctgtctcccggggcacccgccaggtgacccgcgcctccgtggagtggtacggccccgaccgcgccaagttcctgggccccttcaccaaccccccttcctacctgaagggtgagttcgctggcgactacggctgggacacctctggcctgtccgccgatcccgagaccttctcccgctacagggaggttgaggtgatccatgcccggtgggccatgcttggcgcccttggctgcgtcgtgcccgagctgctggaccgcaacggcaccgtcaactttggcgagaacgccgtgtggttcaaggccggtgccgccatcctcggcgatgaccggctgaactacctgggcaacccctccctcatccacg

SEQ ID NO: 1242 - DNA, 469 bp, Chlorella vulgaris
  unsure (1)..(469): unsure at all n locations
acgcgtcagatagcgggcaaggacgcgttccacctccgcgtgcgcgtgcaccccttccacgtgctgcgcatcaacaagatgctttcgtgcgccggggctgataggctccagaccggcatgcgcggcgccttcggcaagccctttggcgtggctgcccgcgtcggcatcggccagatcctgctctccatccgctgcagggagcagcacgcagtggtggctgaggaggctctgcgccgtgccaagttcaagttccccggccgccagaagatcgtggctagcaggaactggggcttcaccgactacctgcgcgacgactacctggagtggaagcgcgagggccgcctggtgaacgatggcgtgaacgtcaagctgctgggctgccacggccccctggagaagcgcgagtctgcgcacatcttccccacgcncgcccgcctctaccggacccccgtgcacggctctgacgacg

SEQ ID NO: 1243 - DNA, 394 bp, Chlorella vulgaris
cacgcgtcaggcaattcaacctcgctcgtgcacgcaagtacaggccagaaggtgccgaccgcagctgctagccgcaggacaccacctccggtacttcttaccaccaatcagcaaaactgtggccgtataatcaaggctatcaggcgggaagcatgggggcctgctgctcagtgcccgaggagagggtgactgtggtgacacagcagcctaaggcagtctacacgcaggcagcctacacccctgccgcctacccaacagcagcacctgcctatggagcacctgcctacggagcacctggctatgcaccaccgccgcctggctactatgcacagccgccaccgccgcctgcatactacgcgccgcctccggcctatgcctaaccacaacaacaaac

SEQ ID NO: 1244 - DNA, 447 bp, Chlorella vulgaris
acgcgtacgctacccaaatgccggtagtgctgaggacatgtacaccagtgaaggcacgggggtgaggaaggcacctagccccctgctggactggtgccgcgccaacagcgcagagtacctggcggtgcagccacctggccgcaatggccgcgccaaggaggctttcatcaccacagcccaggagctgggccagcaggtgctacaggtggtggggtccaagctgtacgacgtgccgtatgtgatcgtgggtcacagcgtgggcacctgggtggcctacgagtttctgtgtgccgcccgccagcaagggctgcctatgccgcggcacgctttcctatcagggtttgcatccccggacctgccagaggtgcagtggccctggaggcagcagcgactgctaggagagcaggacttcaaggatgagtgccgcgactgggatgtcaatgaaat

SEQ ID NO: 1245 - DNA, 177 bp, Chlorella vulgaris
  unsure (1)..(177): unsure at all n locations
ttcccgggcgcccccncacgcgtccgagaagagcaatcaccgtaacgggcccgtacccgctacgcactctacggctgatagccgcagccacactggtgcgccgcacgaccgtggtgtgtcaccatcgtcttgcgncccatccacaacgaccaaccatgaatgaaccatggtgcctcc

SEQ ID NO: 1246 - DNA, 255 bp, Chlorella vulgaris
ccgtccgctaacgcaaccgcggacgcgtgggcggacgcgtgggcatgcccgccgcgcggggacaggccgccctgccagttctaccgcgagggccgctgcggctacccctctgccgagggcacgactggtgctcctggcgattatcaccccgagttccgtggtggcttttgccgctgctctgcccctccccagttagccgccaccaggacatggacgatgcagctgccgctcacccagggcttcactgacatgttt

SEQ ID NO: 1247 - DNA, 398 bp, Chlorella vulgaris
cacgcgtccaccagcgcgtccggaaacatggcacccaagaagaaggttgcggcccctcctgccgcggtcaggaaggccgctcagccggccaagcccgtgaaccccctgtatgagaagaggccgaaggacttcggtatcggtggtgccctgccacccaagaccgaccttcaccgctttgtgaagtggcccaagtatgtgcgcatccagaggcagaagcgtgtgctcaaccagcgtctcaaggtgccccccgcactgaaccgcgtcacccgcacgctggacaagaacatggcccagagcctgttcaagctgctgctcaagtaccgccccgaggacaaggcagccaagaagtcagggctgctggctgaggccgacgcccgtaccgccggcaaggatgtgga

SEQ ID NO: 1248 - DNA, 416 bp, Chlorella vulgaris
cacgcgtccagtaccccaccctcatcacccaccaggactctgtggagaacaaggccaccgagatccgcagcagcgtgaagtaccagctgaagaaggtgctgtgcctgggcgtggccgtcggcaacgtcagcatggctgagcgcgagctctacatcaacatccagatgagcatcaatttcctggtgtccctgctgaagaagaactggcagaacgttaagtccctctacatcaagtccaccatgggcaagccgtaccgcctgtactgagcggcgctggcagcgctgggcctgctacgccgtgctggcaacgcgccctgcgcgtcgggcttgtgtgggaggctggcgtggctacgcttgggagtcgggatttggaggtaccctcacgactggcaccagaccaacggtcggctgctgcac

SEQ ID NO: 1249 - DNA, 363 bp, Chlorella vulgaris
cacgcgtcagccaccgcgtccgcccttgagagcctgttgtaagggtggccatgttgactgccaggtgtgggtgccagataatccaacccaaattttctgccattgtttcatgttatctgcatgggtcacgtgctttgacaaaactgcaaactgaccatttaccacacttgttgtaaccacgtaaagcacccaaaagaaaaaaaaacaaaaaaataacaaaacaaaaaaaaaaatacaacaaacgcaacaacaaaaaaaacgatcttaaaccaaggacagaagatgacagccacgccaccaacaaaaaaaaagggggggccccccaaagggttcaaagcttaatttcccgctaatgaaacttca

SEQ ID NO: 1250 - DNA, 327 bp, Chlorella vulgaris
aagatgccgtcccagaaggcttttgccatcaagaagaagctggccaagaaggccaagcagaacaggcctatcccgccctggatccgcttcaggaccaataacaagatcaggtggaacgccaagcgcaggcactggcggaggaccaagctgggcatctaaacggccagcattctcgctttcttgtcggcattgcagcttgggagtgcagacgcctggcctggccgacctttattgttgcggcagcgcagcagcctggcggaaggcagtagcaaccgcagctggggggcagcctcctggcccatgcagtaatgtaacaacctacgctag

SEQ ID NO: 1251 - DNA, 370 bp, Chlorella vulgaris
gtccgccaagccagccctttttttttattttttttttcttttttccacgatggatagttacatgattgtggcacctagggaaaccagccaaccatccaacctacgctggtaaggtaatatagattggtcacaccgtgcattgaaaaaagggcatggcgcaggccatgcaacaccgcaccaccagactcttcttattacacagacaggctctgaatccactcacacagaccggaggaacaatatcagtacccgtacgaccgtactatggaggtgctaaggcacacagcgggcaacaaaaacgacaatgtgtggatccggtaacatggggccatggccgaaggcctgcacccgccatcccaactagtacggt

SEQ ID NO: 1252 - DNA, 403 bp, Chlorella vulgaris
  unsure (1)..(403): unsure at all n locations
agcttggctgacctccgtactgccggcactcagccctgagccattcccacggtccgcaagcatggctgaggcagcagctcttactgacgagcatgtggcagagttcaaggaggcgttcgcactgtttgacaaggacggtgatggcaccatcacaaccaacgagttgggcactgtgatgcggtctctgggtcagaaccccacagacgcagagctgcaggacatgattagcgaggttgacgctgatggcaacggcaccatcgactttcctgagtttcttgggctgatggcacggaagattaaggacactgacagcgaggaggagctgcgggaagccttcaaggtgtttgataaggacggcaacggcttcatctctgcngcagagctgccgcatgttatgactaac

SEQ ID NO: 1253 - DNA, 426 bp, Chlorella vulgaris
cacgcgtcagagacgtcagacaccattgagaatgtgaaggcaaagatccaggacaaggagggcatcccccctgaccagcagcgcctgatcttcgctggcaagcagctggaggatggccgcaccctggccgactacaacatccagaaggagtccacgctgcacctgatgctgcgcctgcgcggcggcatgcagatttttgtaaaaaccctgaccggcaagaccatcacactggaggtggagtcgtcagacaccattgagaatgtgaaggccaacatccagtacaaggagggtatcccacccgaccagcagcgcctgatcttcgctgggaagcagctggatggacggcgcaccctggccgactacaacatccagaaggagtctacgctgcacctggtgctgcccctgccccgccgcattcaaaacttt

SEQ ID NO: 1254 - DNA, 451 bp, Chlorella vulgaris
acgcgtacgggactcccccgtcgacaacaggtccaaggttcacaagatgcagaccctctctgcccgtttcggcgtccgcgcccctgtctcccggggcacccgccaggtgacccgcgcctccgtggagtggtacggccccgaccgcgccaagttcctgggccccttcaccaaccccccttcctacctgaagggtgagttcgctggcgactacggctgggacacctctggcctgtccgccgatcccgagaccttctcccgctacagggaggttgaggtgatccatgcccggtgggccatgcttggcgcccttggctgcgtcgtgcccgagctgctggaccgcaacggcaccgtcaactttggcgagaacgccgtgtggttcaaggccggtgccgccatcttcggcgatgacgggctgaactacctgggcaacccctccctcatccacgcacag

SEQ ID NO: 1255 - DNA, 434 bp, Chlorella vulgaris
cacgcgtcagccaacgcgtccgcggacgcgtgggcgtcaagctgcccggcaactttggctttgaccccctgggcctgggcgcggaccccaagcagctggagtggaatgcggagtctgagcgcgtgcactgccgctgggccatgctgggcgttgccggcatcctggcacaggagattgtgcaccccgagcagttctggtacacctcgggcgccgagatcaagctgcccttcaacatcctgggcctggtggcgtttgagctctttgccatgcactgggtggaggtgaagcgtggtctggacctgaaggaccccggcagccaggactttgaccccgtgttccagggcaacaagctcaagccccatgaggttggctaccccggcttcacaatctttgtgctcggcgacatggaggagctgaagctgaaggagattaag

SEQ ID NO: 1256 - DNA, 403 bp, Chlorella vulgaris
acgcgtacgctacatgaacatcccagtcatcgccttctgcgacaccgactctgacctgcagggtgtggacgtggcgatccccgccaacaataagggcaagcactccattggcatgctcttctacatgctcacccgcatggtcctgcagatgcgcggcactgtgtcggctgccaacccctgggacgtgatggtcgacatgttcttctaccgcgagccggaggaggccaaggaggagggagccgcggaggaggcacccgccgtggagtacgcgcccgataccggcttccaggcagcgctgccaggtgctgaggagggctatgatgcgtacggctacaatgccgcgggcgaggctgccactggcttcgccaccggcttcgagccggcaaccggctttgatgccgcg

SEQ ID NO: 1257 - DNA, 259 bp, Chlorella vulgaris
cccacgcgtcagccgctgaattgaacttgaaaggatattgcctggcagtgcccggtttggtaccatgcaggcgaccatgatgcaggtgaagcccgccctggcgtccagcttcgtcgccggcagtaggatcatgctgcagtgcttctcgatccgggtggtgctgtccggtgtgacagcagtacgggcagcatcagcaacagcagctgagactgaggacaggtatacgttgaacaacctatcatcacagcctggctcacgc

SEQ ID NO: 1258 - DNA, 131 bp, Chlorella vulgaris
cacacgtctagtgtgcatgtgataagacctaccgcaccagcggcggctgctgggagtgcgccgagggcgtggacagcctgtaccccggctgtgattacgttggagccctgggcctggccgacgaccccgac

SEQ ID NO: 1259 - DNA, 394 bp, Chlorella vulgaris
cacgcgtccacccacgcgtccgcacaataaggaagttctcttaagctgtgatccccggtccgaggtcaaggagtcatctggctgcgagacaagcatcagaagcctcctgaatggggcaaaaccaaaacaacccaaggcgttgggccccctgccccgcctgggggcgacaacaagaaggatgggcaggagaagaagaagaagtatgagccgcccgcgccgcctccacgagtgggcaagaagctcaagcgtcgcgaccacgcctcggccctgggctccaagctgcccctcatcaaccccaccgccaagtgcaagctgcggctgctgaagctggagcgggtcaaggactggctgctgatggaggaggagtttgtgcagaaccaggagcggctcaagc

SEQ ID NO: 1260 - DNA, 348 bp, Chlorella vulgaris
ccacgcgtcagccttcggcgccaacctgcgcaaggctgtgcccacccagggcaagggcacccgccaggtgacccgcgcctccgtggagtggtacggccctgacacggccaaattcctgggccccttctctgagggctccacccccagctacctgaagggcgagttcgccggcgactacgggtgggacactgctggtctgtctgccgatccccaaaccttcgctgcctaccgcgaggttgaggtcatccatgcccgctgggccatgcttggcgccctgggctgcctgatccccgagctgctgcagaacgccggcgtggccagcttcggcgacgctgctgtgtggttcaa

SEQ ID NO: 1261 - DNA, 398 bp, Chlorella vulgaris
acgcgtcagcccacgcgtccacccacgcgtccgccaagatggcgaacgacaagtctcgctccgccgaggtggtgacccgcgagtataccattaacctgcacaagaggctgcatggcataaccttcaagaagagggctcctaaggccatcaaggagattaagaagtttgcccagcaacaaatgaagaccagcgacgtgcgcgtggacttcaagctgaacaaggccgtgtggagccagggcatcaagaacgtgcccaaccgcctgcgcattgtgatccagcgcaagcgcaacgaggacgacgacgagaaggaggagatgttctccctgctcaacctggccgaagaccagaccagcaagggccaaggcgttgtggtcctggaggcaataacacacacacgc

SEQ ID NO: 1262 - DNA, 334 bp, Chlorella vulgaris
cccacgcgtcaggcaaaatagagagtgggggctggcgccctcatggaatggccttcaagcaactgtagtcaggggtccaccagagcccaccaggttcaaacggagtccccctacctaggttgcgtgcgttggtcagactgccaaggcctgaaagtgtgggaagcaagcagacgttgccacttatcaggtgaagtttcacagccacgtagatgtgtcaaattcggcatgagcgtatgcacatatgaaacacttcatcgagactgccacaagtgggcggtgtgtgcctaatgtgtgttggcggtggcagacactgtgaacagaggatacgtggaaa

SEQ ID NO: 1263 - DNA, 237 bp, Chlorella vulgaris
acgcggcagagtgtcggtcactagtggaggaaagccggacatcatgcagctcagcagcgcttttttagggacgcagtttaagagtgcattccaaagccgacagcggcagaagcagacgccgcgccaagtcacatgcaaggccaagaggaagggcgacacgtgctagtgtgactcttgaatgcacagaggccagggctgagggcgcgagcccctcgcaatatgtgacccagaagagca

SEQ ID NO: 1264 - DNA, 385 bp, Chlorella vulgaris
cccacgcgtcagcccacgcgtccacccacgcgtccgctgattgcaaccttgccccgaaggaaaggaaggtggtgggagtgccttggaagggggtccttgtcgaacacccatccacaagtcatggttcgcccaaaaaccttcaaggaggagcatcccctgtagaaactgcaagcggaggcagccaggattcgcgagaagtaccctgataggataccggtcattgtggaaaaggctgagaagagcgacatcccagacatagacaagaagaagtatcttgtccctgctgaccttaccgtcgggcagttcgtgtatgtgatcagaaagcgaatcagggtctcgccagagaaggccatttttatgtttgtgcgcaacgtgctgccgccca

SEQ ID NO: 1265 - DNA, 287 bp, Chlorella vulgaris
gacgcgtgagatttgccacttgccacgagcgctccatgtgcccttcaccaagttcgatgctcacattgacgtcatcaaggcagcccttcagcaagcttctgcggcaggcacggtcactacagcggctgacggcgccgggaggggcacaattgcaggtggtgatacgcaaaacaaggctccatcagcagcagcggcggcagcatcagcggcggcaccagcacgagaacttggagggttcgctgcagcacgcgtaagttcccatggtggcagggcgctgggtgatgccc

SEQ ID NO: 1266 - DNA, 330 bp, Chlorella vulgaris
gcttggtgaagtactttggcgatccgacaagcaccatggccggcctggcaggcgctctcctcggtgcgggcaatcccctcttggacctcagtgccgtggtggaccagccgctactggacaagtatgagctagtgctgggcaaccagatccttgccgaagacaagcacctgcctctgtacgaggagctggaacagaactttaaggtggactacattgcgggcggcgccactcagaacagcatccgcgtggcgcagtggatgctgcaggtgccaggcgccacctcctactttggctgtgtgggcatcgaccactacgccgagcagctgcggg

SEQ ID NO: 1267 - DNA, 323 bp, Chlorella vulgaris
  unsure (1)..(323): unsure at all n locations
cccacgcgtcaggctggggagcatggtcttgatggcggctggcttacagagccagccagcgtcctggcggggcagcagggggctgccctgccccattgagcctgtgttggtgtattgcaaatgtcctgcacggtctgtggttgccactgaggcggcaggancgcagcgctgcagggctgttttaggtactttgagttcctcccaagtttccttggaagccgggcccaggcgtggagggggctgtgagcaaacacccaactctgtctgccgtctgccacgcctggggcccagtgtgtgccatgaatccgtgcttggtccctggc

SEQ ID NO: 1268 - DNA, 405 bp, Chlorella vulgaris
cccacgcgtcagcccacgcgtcagggaaggcagtgcatctgctgaggaccgaaacggacaaccatgcagattttctgcaaaacagacaggactcatgtccttgagcttagctccgacgccactgtggccgatgtcaaggctgccatcgaggccagccagggcatcccctgcgatgcgcagcgtgtgatgttctctggtccccagctggaggaggaggcctccctggccgcctgcggcgtgttctacgacatccagctgtacatcgctgatgcgcctgctgggtggtgccaagaagcgcaagaagaagacctacaccaagcccaggaagcagaagcacaagcacacgaagatgaagctcagggtgctcaagttctacaaggtagacgacagccgcaaggtgcagcg

SEQ ID NO: 1269 - DNA, 326 bp, Chlorella vulgaris
cccacgcgtaaggtctccacaatggccgccgctatgtgccagacctctgttgcccgggccttcgcccctaaggtggctgcccagaagcgccagcgcgctgttgccgcccaggcctatgttggcaactggctccccggcagcgaccgccccgcctacctggagaagctccctggtgcctacggctttgaccccctgggcctgggcactgggcccaagagcctggagcgctttgtggaggctgaggtgattaacggccgctgggccatgctgggcgttgccggcatgctcggcgtggaggccctgggctacggcgactggtacagcgc

SEQ ID NO: 1270 - DNA, 354 bp, Chlorella vulgaris
cccacgcgtccagtttcaagtgggtttgcacctcacttggtgtgtggtagttgggattttgcgatgtcgctgtggatccgctctcttggaacgcaacgaggattttctgtgggtcgtgcatgtccgcactatgttgtgctgcggcgtgcttcaacatattttgagcataccttagtgtaggctacatgcatatatattgacaccggctctgtgtctatgtcaggctcctccttcgatccacattgcattttgtgtttcacaggccttttagtgaagacctgtgttccttactgacttcgtgggggcgtttgtgtatgtttcgctgttattttgcaatgaaacagagacgcgatt

SEQ ID NO: 1271 - DNA, 308 bp, Chlorella vulgaris
acacacgctcaaggcgctcaggaggcctcttcgagccctgcctggctatcccacttaggacaagatgccgcctaagcgtacgagctctcaggaggagaatgtcaccctgggccctgccaccagggagggtgagctggtgtggggtgtgtgccacaatcttcgcgtccttcaatgacacctttgtgcacgtgactgacctggcggggaaggagaccctggtgcccgtgactgggggcatgaaggtcaaggcgcgccgtgacgagtcgcccccctacgctgccatgcgtgccgcccaggacgtggccgct

SEQ ID NO: 1272 - DNA, 367 bp, Chlorella vulgaris
gacccacgcgtcacgggatccgatgcagaccgcgaagaatccccggttgacgtggtcaagtcgcgcatgatgggtgccgctccgggcgtgtacagcggagttctggatgcttttgcaaagaccctgaagcgggacggccccctggccttctacaacggcttctcgctcaactttgcgcgcctgggcagctggaacgtggtgatgttccgcacgctcgagcaagtcaaggccctgatggccggcaagaagcactaagccgcggctcgggtggcgcagataagcctacaggaggcagctgggctgatgcagccgaagcatggggcccaggggctgttgaaggccactagatgctaccgtgatggtggca

SEQ ID NO: 1273 - DNA, 313 bp, Chlorella vulgaris
acgcgttccaaataaaaaataaaaaaaaaaaataaatagaaaatttaaaaaaaaaaaaaagattgcatctggcagtgtgtcagtacactctgtaaatctagctactagttgcagggtcttgtataggtgcttcatgattggcagcctggttcgttaccgattgaagtctgtcttgcggagacggaaggtggcctatagctgtggctgttgcctcagtgcccccgttactgaagggtttctctttcaccgacagctgtgatagcttctgggtggtgaatttgttcgatggtgttttattactgcaaggctctcg

SEQ ID NO: 1274 - DNA, 289 bp, Chlorella vulgaris
acgcgtcagcccacgcgtcaacccacgcgtccgatcggcagcggccagcgcatggccttggcatggggttgcgacttgagttatgactacgtgaagatcaatgcggaatacaccacataggcagatgtggaggagacatggagggcttggggtggacggctctgcaactactgcagctcaaatatgttgtagcgcacagcttgctcgctgggtgctcggccagcctatcaaatccaggtgtgaccaaggagttgtcattgtgcgctgaatacagcggcagcttggctgg

SEQ ID NO: 1275 - DNA, 383 bp, Chlorella vulgaris
tcgacccacgcgtaggcggcttttaccgccaaggaattcgcagggttaagctagaagaaaggcttgaggcattgcagggaatgccggcaggggggccgaccccagggccgcgtagggctaggcctgagccagctgctggtgtcagggaggagcccgtgaaggttgcgcccgccagcaatggtcctaccagcacgggcccggccagcactagtgccccagcagcccctattgagagggtggtggccaaggcccctgcagcagcagtggagccagcaggtggcatccagctgcaggagttcaagaaggagctctgagaccacggagccttgcgccgttgtgggggagagttccgggttaagaggacgtccaaaggggaccagggg

SEQ ID NO: 1276 - DNA, 425 bp, Chlorella vulgaris
ccacgcgtccgcccacgcgtcagggctagcttcgtccactagcatgtaagccgccatgcatcgacattcttcactatgttcagcgcaagccagtctccatgtcacaccatgccaccactggcagttgcaaaaacccgcccgggcttggatgaggaatgctaggctggtaaaggctgaggcagcacaacctctagttgcagctgggccgacacacgaggggcctgactacaccaagattgatggccaacccctgaacaggctggtgtatggcctgtttcggcgccgcatggcccagcagctcggccaggattccaagctggacgggtatggcgctatcatagatatgactccgcggttgaacagcctaccaacggcacgtgaaacccaggaagcaaccgtgcgcaccctgcggtccttggttcccc

SEQ ID NO: 1277 - DNA, 355 bp, Chlorella vulgaris
ccacgcgtccggtcaaggacctggtgcagctgctgtttgagaccgcgctgctggcctcaagcttctcgcttgacgaccccaacacctttgccaaccgtatccatcgcatgatcaagctggggctgtcgatcgatgacgaccttgaggcgctggatgctgatgatgctgacctgccagaacttgaggagaatgtggatgagggcaaccgcatggaggaggttgactaagcaactagcattagaaacgtgccatgctgggccttggatggggcagcagcgagcagatggtcagctgaaaagctagcggggctgacgccctgagccagccctgctgctcgtaccagtctcaaacttgt

SEQ ID NO: 1278 - DNA, 398 bp, Chlorella vulgaris
cccacgcgtccgcccacgcgtccgctctgagggctccacccccagctacctgaagggcgagttcgccggcgactacggctgggacactgctggtctgtctgccgatccccaaaccttcgctgcctaccgcgaggttgaggtcatccatgcccgctgggccatgcttggcgccctgggctgcctgacccccgagctgctgcagaacgccggcgtggccagcttcggcgacgctgctgtgtggttcaaggctggtgcctccatcttcggcgatgatggcctgaactacctgggcaacccctccctggtccatgcccagtccatcgtggccaccctggccgtgcaggtcatcctcatggctcaggctgaggcttcccgtgtgagccgcactgccccctgga

SEQ ID NO: 1279 - DNA, 322 bp, Chlorella vulgaris
cccacgcgtacgcacagcggctgtatcacttctccttatcctgccttcaacagatacagttgcactaacatggcccccaccgctgtcatgcagctgcaactgcagcaggttcgcaaggtcactcgccaggccgcctcccataaggcctttgtcgctgcccctgtcgccaggaaggccagcgtgcagcccgcagccatcagcccagccgcccccagccggagggtcgctgtcaaggctgttgccgaggccaaggcccctgcagcaaccgcagccagcacccaagagtggtacgcctgcgtggccagcgccgagtttttcgaca

SEQ ID NO: 1280 - DNA, 421 bp, Chlorella vulgaris
aggtggctcccgcggtggacatctcccagcactgggcactggtagcctcaccagcctgccccggcagtgagcagcctcaggagcctgctggggctgcagcatctgctagttgcagagcgggagggccgagtgcagccccagacccagaccttattctggtgccttctagctatatggagggcggcagcattgtgctgcggcgcagcatgatccagcacgccaaccagcggcacctgctgttgagcggtcccggtgcagccagagtagcggggctgcactgtgctgttcacatcctgtacagtgagcaggacgatgctgtgccgcgggagatacctgagcgcctggcgcatgtgctggagcggtcaggcaactgctcgtacctatgcctagagaatgtgccgggtggggaccaccgcttgtc

SEQ ID NO: 1281 - DNA, 432 bp, Chlorella vulgaris
cccgggccgacccacacgtccactctttcctgctaggtccccaatcctcgtgctgcagcggtcatgttgggcgctgcaaccgccgctaccctccaccaaagcagcctccttgctcatagatgccgtgtccggcttcaaagccggcggtgcagcggcaaggtgtttgcgccaaaagcctccagcgacagcaacagggagggcagcagcgttgactgggaccaggcatggagcaacttttctcagaatgccggggccaagattccagaggttgagagcagggtgtatacgcaggcaccgaggttcgcggagcgcaggacctggaacgtgggccagcagcaggagagcattagacggcaggagcgatacctcctcaactactggtcacaggacacgttcttcaagggcgggggccttgccgtcctagccttgttc

SEQ ID NO: 1282 - DNA, 439 bp, Chlorella vulgaris
gggccgacccacacgtccacggacgcgtggggtgctatcatgggtgtccaagtgcagactgtcactcctggcgatggggtcaacttccccaagaaggggcaaaaagtaacagtccactacacaggaacccttacaaatggcaagaagtttgactcctcccgggatcgcggccagccctttgatttcaccatcggtgtggggcaggtcatccggggctgggacgagggcgtggctcagatgagtgttggccagcgtgccaacctgctgatctccgccgactatggctatggggcccggggtgctggaggtgtgatcccgcccaacgctgatcttcagttcgacgtggagcttatcaagatcacctgagcaatgccagagcaatgcaccccattggctcacagctagtgctgcaagagccgacactttgctgcacctgggt

SEQ ID NO: 1283 - DNA, 408 bp, Chlorella vulgaris
ggggccacgcacgcgtccgccaacgagtccgcccacgcgtccggttccacctacttcacattatcccagagccggccatggtgcacatttgggctggtgtctatgtgccgccagatgagaatgcagagctcttagaagtcgaggacaccaaaatgtttgtcagccacagatttgcccggcggctcatggatgccaagatccccttccggctgcatgtgatagtgggcccgaccgacaccgacagcgtggcggaagtgattgccaggaagtgcagtgacctgcaggcggcctgtgtggtcctggccaaacactctaagggacgcctcaaggagctctgggccggcagcgtcaccgtggcctgcctgcgcaaatgctgcaaggtgcctatcgctgtggttccgcactact

SEQ ID NO: 1284 - DNA, 363 bp, Chlorella vulgaris
tggggcaacgtggaggagaaggctggcgaccgcggctcactggcccgctgctctggcgactacgccatcattgtggcgcacaaccctgatgccggcatcacccgcattaagctgccctcgggcgccaagaaggtgatcagcagcgagtgccgtgggaccgtgggccaggtgtctggcggcggccgtaccgagaagcccatgctcaaggcgggccgcagctaccacaagtaccgcgtcaagcgcaacagctggcccaaggtgcgtggtgtggctatgaaccccgtggagcatccccacggtggtggtaaccaccagcacattggccacgcctccaccgtgcggagggacgccccgcccgggcaa

SEQ ID NO: 1285 - DNA, 350 bp, Chlorella vulgaris
  unsure (1)..(350): unsure at all n locations
acgcgtccgggttggtggaagggggagagccgcaaaaatggcgtcggacaagaaggctcagaaccccatgcgcgagatccgcgtcgcaaagctcatcctcaactgctgcaccggcgagtctggtgatcgcctgcacaaggcggcaaaggtgcttgagcagctgaccgggcagcagcctgtgtttggcaaggcccgctacaccgttcgccagtgggccatccgccgtaacgagaagatctcctgccacgtcaccgtgcgcggggagaaggccgtgcanctgctggatgccgggctcaaggttcgggagtaccagctgcttcgtcgcagcttctctgacagcggcaactttg

SEQ ID NO: 1286 - DNA, 424 bp, Chlorella vulgaris
gcactggtcagagcgcgcaagccggtacgcaccatgcagtttgttcaaaggcgcccggaccccaaggttgcccggaaggagctgcagtataacgtatcagtgttcgcggctaccatccttgtagtgcgggttatcccttacatcctgcaggcgctgcagaagcagtcttgatcagacggcttcccttgtagctccagcgctctgaaagaagatgtgtggcatttttggctactacaacttccatgtgggacgcacccgaaaggagattttggactgcctgctgacggccttgaagcggttagagtacagaggctatgactcggcaggggtggcgcttgacctggagccctgcccacagaacggcttcgccaacggcgtgtctgtctgcgccgcaggtgcgtagcacctgccgcagcgcttgctg

SEQ ID NO: 1287 - DNA, 403 bp, Chlorella vulgaris
acgcgaccgcaaacgcgtccgcccacgcgtccggaacgtgtctgttgtggacctgactgtgaacctggagaaggaggcgtcctacgacaagctcatggacgcgttcaaggcagcatcagaggggcccctcaagggcatcctagggttcacgaccgaccaggtggtgtcgtccgacttcatccacgacagccgctcctccattgtggacgccaaggccggcatccagctgtcgcccaccttcgtcaagctcatcagctggtacgacaacgagtggggctacagcaaccgcctggtggacctggccatctacctggccaaggccgacaaggaggccggcgtataagcagcaggtcagctggaatgcgtgccggttggagggcggctgtatggtcacccaaccaga

SEQ ID NO: 1288 - DNA, 465 bp, Chlorella vulgaris
ttcggggggccacccacgcgtacggacgtgcggcagcagcgacgatggtgctgtcgtgcgacatcgatctcctgcatcctccccaggagctggagaagcggaagcacaagctcaagcgccttgtagcttctcccaactcctatttcatggacgtcaagtgccaggggtgcttcaccatcacgaccgtgttcagccactcccagacggtggtggtgtgccccagctgcaacaccgtgctgtgcgtgcccaccggcggcaaggcccgcctcacagagggctgctccttccgcaggaagggcgattagtcaggggaggcgctacgctggcatgtggtctcaagaaagtgcgccgccgcggcttgaggactcttgccagcgggacagcgcggcctatcaggacaggaacaggaaaggagcgaagaagatttgcaaagcatggaaagaaggttgttacggaatgggttgc

SEQ ID NO: 1289 - DNA, 366 bp, Chlorella vulgaris
agaaaaatccccaaaaaggcaattgtggacaacctggaggcccgccgccccaagaacaagcaggcacccgcccgcaaggccgcccgcagggaggagcgcttcgcaacagggcagatcggcactgccgccaccgagtccaagaagtaaatgagccacccttggtgttggctgactgccggctggctgggtgctgctggctgctgttgaagccgttaacagcaaggacagggtcactggtgaatggcagctgttgccgtcgctacaaacccaggggcgccagcggcagcagcgacagttcttggcttgtgctgtctgctgatgccgaggccgcggccggctggtaagcccgctgcgtctgccctcttt

SEQ ID NO: 1290 - DNA, 353 bp, Chlorella vulgaris
gcgtccggaacaaagggaggaaacccgggagatagaagtggaggtgctaacagaggcggtatcggacgcagttgcagacgcccgtgaatgaggtgcggtggtgcaagccgccgtagaggacgcagtcacagaagccgtacacgatacggttctccaagccattgacgagaacgtcaactttgacgtgcgggccaacctgtacacgctcatatccgtgacgggggtcatcctgtactggcggggagtgtggaacacctgagactaactgtttggcctcagattgtggagtgacgttgcctgcgtcgccaccgggctgtccattatgatgctcataacgcttacaaacctgccac

SEQ ID NO: 1291 - DNA, 333 bp, Chlorella vulgaris
aaaaaaaaaaaaaaaaaaaaaaaaaaaaaaaaaaaaaaaaaaaaaaaaaaaaaaaaaaaaaaaaaaaaaaaaaaaaaaagggggggccccccaaaaggttcaaacctaagtaccccttgaaggaaagttaaaacccctccaaaagggcccccaaattcaatttaaggggccgccttttaaaaacttcttaacgggaaaaacccgggggttaccaaattaaacccccttgaagaaaatccccctttcccaaacgggggtaaaaccaaaaaggcccccaccgattccccttccaaaaatttccccaccctaaatggcaaatggaacccccccttt

SEQ ID NO: 1292 - DNA, 396 bp, Chlorella vulgaris
gcgtccgcaaacgcgtgggcggacgcgtgggtagctccgaggccaacgtggcccatgttaaaggtgccaaccaaggcaaccaagggaacccctgccaatcccaaccttttatgttccccggtcgccaacttgaagaagaaggctcccttgccccctgccgcctgtctgacgacagccagctgtacatcctgatgcgcctgctgggtggtgccaagaagcgcaagaagaagacctacaccaagcccaagaagcagaagcacaagcacaagaagatcaagctcagggtgctcaagttctacaaggtgcgcaggggctagcgaaccggagaaaggcttggagcaatccctcggaggttcctgatgggctgactggtgtagctaatgacaggcgcaccac

SEQ ID NO: 1293 - DNA, 417 bp, Chlorella vulgaris
ccacgcgaccggaccctttgccgggcagctgcggctacgtgcaggtggtcaacgccaacacctttgctgtggacatcagcggctacagcctgggcggcgcggtgccgttcaccttcaggccaggcacggtcatcccagcccaggacagcgtttatgtggcagcggacatcaatgctttcaagcagcgcagcagcagccccaagggcggagagggcaagtttgtggtggggccctttgccgggcagctgctgggagcgggtgccagcgtgaccctagcagacccacagggccagactgtggcaaccacgtaatgtggttcctagggggcacaaagcgtggttaagtggagttgacctgatgttatggatgccggtcaggtggtgacatgccactgaaatgcatgaaaaagggaaaatg

SEQ ID NO: 1294 - DNA, 423 bp, Chlorella vulgaris
cccacgcgtccgcacacgcgtccgagcaaacaatggcagcagttgaggaggttgagagggttgagcaggtggaggacgtcgaggatgacgtcagtgacgatgtcagtgacgacgaggagggagaggaaggcgaggagggcgagcgcaggggcaagcagagccgctctgagaagaagagcaggaaggctgtgcagaagctgggcatgaagcctgtgccaggcgtaatgcgcgtgcagatcaagaagagcaagaacatcctttttgttatcaacaagcctgatgtgtacaagagcccctcttctgacacctacgtcatctttggcgaggccaagattgaggaccttagcgcacaggcagcaggcgcagcggctgagcagttcaggatgggcgagcccctggcggagccacgtgctgccaaagctg

SEQ ID NO: 1295 - DNA, 472 bp, Chlorella vulgaris
ttcgcgcggtcacccacgcgtccgcacacgcgtccgcccacgcgtccgggatgttgcgatcgcttcctgtagccgctccagccttctgctcgcgccttgctcggcacaagacaacctcacgtcggggaacagcagctatggctgccaagaaggtcctggtcccgataggtactggcagtgaggagatggaggcggtcatcaccatcgatgtgctgcgaagggctggcgctgaggtgattgtggcgagcgtggagggcagccgggaggttgagtgcagccgcaaagtgaggatcctggcagacaaactcatccaggactgtgccaacgacgcctgggacctcatagcgctgccgggtggcatgcctggcgcggagcggctgcgcgacagctccgtgctcatcgatttgctaagcaagcagaagagccaggacaagctgcatgctgccatttgtgccctcacagctgtggcctt

SEQ ID NO: 1296 - DNA, 394 bp, Chlorella vulgaris
ttcgcgcgggccacccacgcgtacgtattgaggtgccatgttcacagctattgtgccgctagcgtattgctgcagcagcggactgacaagttgtgactggtcaaactgccccagcaacacatgcctggtgactctcttccttctatgtctagctaggctaggtaggtcgattgcgctccatacgaactttcccttgtgtcgacgttgcatccgattctttccatggtcaggttgaagcttgcaaggaccggactttggttgtgcaggagtatgtagtgcagtgcatgccgccatcctgctgaaagacttgcttagctggctttgtatgcttggactgtgtgtaacattaagtctgtcaaaaaaaaacaaaaaaaactaaaaaatataactaaat

SEQ ID NO: 1297 - DNA, 374 bp, Chlorella vulgaris
gcgtccgaaagtcaacactggtaatcatgaacctgatcaaggccctaaaccaattccacaccaactaccggaacaggctttttgagggcaacaagaagcattttgaggaccggctgcgcacctcaacaactgtctatgtcggcaacctttcgttctacacaacggaggaccagatatatgaggttttttccaagtgtggcgacgtcaagcgcatagtgatggggctggacaagcacaagctcacgccctgcggcttctgcttcgtaatgtactacaccagggaggacaccgaggactgctgcaagtacatcaacggcaccatgctggacgaccgacccatccgggtggactttgactggggcttcgtggaggga

SEQ ID NO: 1298 - DNA, 397 bp, Chlorella vulgaris
aggcaggagtcagggcggagcggttgctgtcttcaggaccgcacacagccaagatgaatgtggaaaagctgcagaagatggccgggagcgtgcggacgggcgggaaggggtctgtgcggaggaagaagaaggcggtgcacaagaccacctccaccgacgacaagcgcctgcagaacacgctcaagcgccttggggtgaacaccatcccgggcattgaggaggtgctgctgctgaacaacgacggcaccgcgctgcagttcaacaaccccaaggtgcaggcgtccatcgccgccaacacctatgttgtctccggccccgcgcagcagaagcgcgcccaggacgtgatggcgcagatgcttgcgggcatgggcggcatgccgggcatggcgtccatgat

SEQ ID NO: 1299 - DNA, 424 bp, Chlorella vulgaris
cacgacttccacggacgcgtgggcggacgcttggggccgacagccgcacaatatggcggattcggtgcaaaccttcgggcgcagaaaaaatgcattggctgtggccaactgcaaccgtgaaaaggggaacctaaggctcaatggctcccctctggactttatccaccctgacaccatgcgctacaaggtgctggagcctgtgctgctcctgggcaaccagcggtttgccaacttggacatccacatccgcttcaagggcggtggccatgtgtcacagatctacgccatccgacaggccatcgccaaggcgctagtggctttctaccatatttacgtggatgagcatagcaagaacgatatcaaggacatcctgctgcagtacgacaggacactgctggtccccgatcctcgccgctctgacccc

SEQ ID NO: 1300 - DNA, 381 bp, Chlorella vulgaris
gcgtccggaggccaacgagaacttcacgcacatcctgcgtgtgctgaacaccaacgtcgatggcaagcagaagattatgtacgccctgactgccatcaggggtattggtcgccgcttctcaaacatctgctgcaagaaggcggaggttgacctgaacaagagggctggtgagctgagccccgaggagctggagagcatcatgaccattgtggccaacccccgcgcctacaaggtgcccgactggttcctcaataggcagaaggacatccgcgacggccgcttcagccagacgacctcctccgccctggacaccaagctgcgcgatgatttggagcggcttaagaagatcaggaaccaccgcggtttgcgtcactactgggg

SEQ ID NO: 1301 - DNA, 379 bp, Chlorella vulgaris
  unsure (1)..(379): unsure at all n locations
gcgtccgcaaacgactatccgaggcttcctcgaagacagaagacatcaacatgtctgacggaggggacagcccgaaggccgccgaggcccccgccgccgccgcggctcccgcccccggcgagcccatggacatcaacaccgccatccagctggtgctcaagaangcgctggctcacgacggcctcgcacgcggcctgcacgaggcctgcagggccattgagcgcggccaggcgcagctgtgcatcctcgccgacgactgcaaccagcccgactacaagaagctgattgaggccctgtgcgccgagcagagcgtcaacctcattgccgtgcccgaccccaagaccctgggccagtgggcaggcctgtgcaagattgacag

SEQ ID NO: 1302 - DNA, 390 bp, Chlorella vulgaris
gcgtccggaaaggcatagcagagtggttcatatatggagaggtggactggacttactgggagagcaagctgaaggagtggggcccgctgctagcacgggcactcatgggagcaggttgggcagcgtggatggatgcggtcatataccacaaggcggtggtgggggagggcgtgcccttcaagtatgccatcccaggcataatggccacactggcgctcatccttatgaacctgctctcacgtaaccagctgcacgaagcagccgagtctggagaagaaggagcagagttccgtgcgcgcctgtggctattcttcaccttgctactatcagttgggtctgtgggaggctcagtggcaatgctcataagctgcgcacagaagcaggagctca

SEQ ID NO: 1303 - DNA, 415 bp, Chlorella vulgaris
ttcgcgcggccacccacgcgtacgcacacgcgtccgattcgaactaacgcctatccgaggcttcctcgaagacagaagacatcaacatgtctgacggaggggacagcccgaaggccgccgaggcccccgccgccgccgcggctcccgcccccggcgagcccatggacatcaacaccgccatccagctggtgctcaagaaggcgctggctcacgacggcctcgcacgcggcctgcacgaggcctgcagggccattgagcgcggccaggcgcagctgtgcatcctcgccgacgactgcaaccagcccgactacaagaagctgattgaggccctgtgcgccgagcagagcgtcaacctcattgccgtgcccgaccccaagaccctgggccagtgggcaggcctgtgcaagattgacag

SEQ ID NO: 1304 - DNA, 402 bp, Chlorella vulgaris
ccacgcgtacgaatttaggccatcctgaaaacaagcacgatggccaaaatcaaggcccatgagctgcggaccaagagcaaggccgacttgctggcccagctgaaggaccttaagcaggagctgggtgcgctgcgtgtcgccaaggtcactggcggtgcccccaacaagctctccaagatcaaggtggtgcggaagtccatcgcccgcgtgttgaccgtggtcaaccagaccacccgcagcaagctcagggaggaggttgccggcaagaagtacgtgcccctggacctgcgcgtgaagaagacccgcgccatgcgcagggcgcttaccaagcatgagaggaccgtccggactgagaagcagaagaagaaggacgcagccttcccccgccggaagttcgctgtc

SEQ ID NO: 1305 - DNA, 429 bp, Chlorella vulgaris
ttcgcgcgggcacccacgcgtccggagccaccaaagccgccagaatgcagaccaccttcgtgggcaccacccaggcgctgcgcgccaaggtctccacccaggccactcgtggctccaaggtagcaacctccatgcgccgcaccgtcaagtccaagaacgtgaagaccaccgacaccagccagtggtacggtcccgaccgccccaagttcctgggccccttctccgagggtgctgtgccttcctacctgaacggcgagttcgctggtgactacggctgggacaccgccggcctgtccgccgaccccgagaccttcaagcgctaccgccagattgaggtcatccatgcccgctgggccatgcttggcgccctgggctgcatcttgcccgaggtcctgcagaggtacagcggcatcgagttcggcgaagctg

SEQ ID NO: 1306 - DNA, 345 bp, Chlorella vulgaris
cgtccgcaaggcatacgcatacttactctcctacccggggcgcaagtaccaaactggctcaatggcggaattggtgcgggctcttcagcggattaaagccgccacaggggtggctacgtcatgggtggagagcgctgtaccatgccaggccatggttttcagtgccgggtccagcggcagggagccaggcggccagcaagttcattttgggtttaagcaggtgcctcgtgacgagaaggcgacgctggtgggccaggttttcagcagcgtagcgccgtcgtatgatgtaatgaatgacctcatgagcggtggcttgcaccgtctttggaaggacaggctggtata

SEQ ID NO: 1307 - DNA, 404 bp, Chlorella vulgaris
gcgtccggaaaacagggtgagcaaggactggaaggaagcggatcaatggactggggtgggttggcaagcagcaaggggcgagggggtgacggggctcctgcgggcaggattggttgagcagcagcagtggtagatgcagttaaggaggtgattctgacttcctgaacagagaggggcagcaggatggctagtgcgctgttgcgttggcaacctatgtgcttgccatcgcatgggcacctaaaactggtattaatagtacacccatttttccccagtggtaggcctgaccccagggtgccccaaccctcctgcctgccccattctgtcggttgttcattctcgctggcacacaaaccctgccagcgttaaacgtatggccctgtttgatctgtgagctgctcgtc

SEQ ID NO: 1308 - DNA, 448 bp, Chlorella vulgaris
gcgtccgccaacgagtccgcccacgcgtcggcccacgcgtccggtgatcgcctacgagcccgtgtgggccatcgggaccggcaaggtggcaaccccacagcaggccgaggaagtgcacgcctctgtgcgcgactggatctccaagaacgtgtcccccgatgtggcggagagcatccgcattatctacggcggctccgtgaccgccgccaactgcaaccagctggccgcggagaaggacattgacggcttcctggtgggcggagcctccctgaaacctgagtttgtggacattatcaagtcagcaaccaccgccaagaaggcctgaatcaaggcctgaaagcttggagcaaccgactgctctgggagaggtctggcgcatgcagtgcgcccttgggtcggaacgtttggttgttgtgaagtgggctgtgggccgcgcaaagatacacat

SEQ ID NO: 1309 - DNA, 418 bp, Chlorella vulgaris
ttcgcgcggccacccacgcgtacgcagacgcgtggggcgattcgaactaacgcctatccgaggcttcctcgaagacagaagacatcaacatgtctgacggaggggacagcccgaaggccgccgaggcccccgccgccgccgcggctcccgcccccggcgagcccatggacatcaacaccgccatccagctggtgctcaagaaggcgctggctcacgacggcctcgcacgcggcctgcacgaggcctgcagggccattgagcgcggccaggcgcagctgtgcatcctcgccgacgactgcaaccagcccgactacaagaagctgattgaggccctgtgcgccgagcagagcgtcaacctcattgccgtgcccgaccccaagaccctgggccagtgggcaggcctgtgcaagattgacag

SEQ ID NO: 1310 - DNA, 404 bp, Chlorella vulgaris
cccacgcgtacgcagacgcgtgggcggacgcgtgggctcgcatccacgtgaaccccgactgcggcctcaagacccgcaagtgggaggaggtgctgcctgcgctgcgcaacatggtgttggccgccaagaccgcccgcgaggagtacatcatccagcagaaggcgggggagggaggggccccggtgccggcagcgacggcacaggccaaggctggggttgccccttcggctccgcatgtaatggcagcaccgggcgagggtgagggtggcaaggtgaccagtgctggggggagggtgccctgcggtgggtgctgccactaaggaggcggagctctcacaattgccaaccagagcagaggcttgtcggtgcatgtttgctatgccctgcaagtagtaggtgctact

SEQ ID NO: 1311 - DNA, 406 bp, Chlorella vulgaris
ccacgcgtacgcagacgcgtgggcggacgcgtgggccggcaacgcctccaaggacctgaaggtgaagcgtatcaccccccgccatttgcagctggctatccgcggtgacaaggagctggacactctcatcaaggccaccattgccggcggtggtgtgatcccgcacatccacaggtccctcatcaacaagcagggcaagaaggagggcctcatgggcctgccgcccggcgccctgcccggcgcgggtgcccctcacctcatctaagcaagtttactctgtatggaagggctagtgcttgccgggctaaggcgttgctgcattggcgccggacgtattgcgtcctaactgactttgactgtatgtggtttctcatcctgaccgtgacccagtgcatgacatgactaa

SEQ ID NO: 1312 - DNA, 430 bp, Chlorella vulgaris
ccacgcgtacagcacacgcgtccgcaccaagtccaccaacatgagctggtggaccggcgtggatgtgaacaacatgctcaacaagaagatccacgtgcacaccctgctggacgcactcaacgactttgctgaggtgcccgagcgcaagaccgacgcgcccctgcgcctgcccatctctggtatctacaagatcaagggtgtgggtgatgtgctggcgggccgcgtggagcagggcattgtcaagcccggtgacgaggttatcttcctgcccacccacaccgccgccaacccctgcatcggcaaggtcttcaccgtggagatgcaccacaagcgcgtggacaaggccggacccggcgacaatgttggcatgaacgtcaagggcctggacaagggcaacatgccccgcactggtgacgtgatgatcctcaag

SEQ ID NO: 1313 - DNA, 411 bp, Chlorella vulgaris
cttcgcagcagcaaacaatggcagcagttgaggaggttgagagggttgagcaggtggaggacgtcgaggatgacgtcagtgacgatgtcagtgacgacgaggagggagaggaaggcgaggagggcgagcgcaggggcaagcagagccgctctgagaagaagagcaggaaggctgtgcagaagctgggcatgaagcctgtgccaggcgtaatgcgcgtgcagatcaagaagagcaagaacatcctttttgttatcaacaagcctgatgtgtacaagagcccctcttctgacacctacgtcatctttggcgaggccaagattgaggaccttagcgcacaggcagcaggcgcagcggctgagcagttcaggatgggcgagcccctggcggagccacgtgctgccaaagctgttg

SEQ ID NO: 1314 - DNA, 387 bp, Chlorella vulgaris
cgtccgcaaacaagtgggtctgcttcagccagcctttgcaaaggttcctcgaattctccacaatggccgccgctatgtgccacacccctgttgcccgggccttcgcccctaaggtggctgcccagaagcgccagcgcgctgttgccgcccaagcctatgttggcaactggctccccggcagcaaccgccccgcctacctggagaagctccctggtgcctacggctttgaccccctgggcctgtgcactgagcccaacagcctgtagcgctttgtggaggctgaggtgattaacggccgctgggccatgctgggcgttgccggcatgctcggcgtggaggccctgtgctacggccactggtacagcgcacccctctgggccgtgactg

SEQ ID NO: 1315 - DNA, 124 bp, Chlorella vulgaris
tccaaccacgcgtccgcccacgcgtccgtgttcataccatctatcatctgacgaggtatcaatctctggatagctggtgttagcctgtactgcacctcggtcttactctagctgagggcctctc

SEQ ID NO: 1316 - DNA, 389 bp, Chlorella vulgaris
gcgtccggagggtatggctcatagcagtgaatgcccaccatgggatggcagtgtgttgcctcagtttgttaggattcaggggttttggggatgtccatgggcaggagcctgcctctttattgctgacaagcatgcaggaagccatctttagcgggtgctggctacgtatttctctgctgggtgctgattgcactgcatatatgagagccacaatagcagtgtgtactctggggccgctgcttgtgcacttttcctggtttgcctatcgtgcagcctcttggttgtgacccagcgacacacttggagctgaggtgcggcagtgctgcctgcaacctttattgccggaactcccgagccttgcatgaatgattgagaactggttttggtat

SEQ ID NO: 1317 - DNA, 391 bp, Chlorella vulgaris
  unsure (1)..(391): unsure at all n locations
gcgtccgccagcgagtccggagcaggccaaggtcattgtggcgccgcggtctaacaacctgctggacaccgagcggatcgagggcgagttcccggagatcctgcccatccgggagtcgctcatcaagtatgtgttcgagcccaatgcagctaagaaggaagaggtcaaggctgctgtgcgcgagatgcgtggccgctgagcatctgtgactgcttgcagcacctgttaggagctagaacgggaccgggaaggcgatcttaggcctttgcccttgcctaagcggtctctttcatttggtcgccgtgtgttttcaatgttcaaccagggaaagcanaanaaaaaacaaaaaaacaaaaacaanaaaaaaaaaaaaaaaaaaaaaaagggcggc

SEQ ID NO: 1318 - DNA, 339 bp, Chlorella vulgaris
  unsure (1)..(339): unsure at all n locations
gcgtccgccaacgagtccgcggacgcgtgggttcgtanaacagagggtctttcaccatggtgacgcctctcatcaaggtgaagagcgtcaagaagcgcactaagcgcttcaagcgtcaccagagcgaccgtaagatctccgtcaaggagagctggaggcgccccaagggtattgactcgcgggtgcgcaggaagttcaagggatgcggcgtgaatatgcctaacatcggctatggcaccaacaagaagaccaggcatctcctgcccaacggcttctacaagtttgttgtgagcaacgtgaaggacctggagctgctgatgaagcacaaccgcaagtact

SEQ ID NO: 1319 - DNA, 393 bp, Chlorella vulgaris
cccacgcgtacgcagacgcgtccggcaacgtgtccatccgcggccgtatccttgccggcaaggtcaagtccaccaagatgaaccgcaccattgtgatgcgccgcgactacctgcactacatcaagaagtaccagcgatatgagaagcgccacaccaacatctccgcccacatcagcccttgcttccgctgctcggagggcgacaccgtcatcattggccagtgcaggcctctgtccaagactgtgcgcttcaatgtgctgcgcgtgatccccgccggctcagcaggcaacatgaagggcttctccggcttctgaaaccgtagccgacagtgcgcagtgaccatcagcggtgttccaagctagccgcgagtttgcgcacggggaacaacgggct

SEQ ID NO: 1320 - DNA, 342 bp, Chlorella vulgaris
ccacgcgtacgcaggcgcgtcgggggagctgtccatcggcgggcgtatcattgccggcagcgtgacgtcgctgggcctcgtgctctccgctctggtgcaccgcgactacctgcactccatcgacgtgtcccaccgatatgcgagcctcaacttcggcgtgtgcgactccttgagccgctgcatccgcagctccgtgggcgacaacgtcatcacttccgaatgcatgccgctgtggacgactgtcagactcatcgtggcgcccgtgttccgcgccggttcaaccagcgctgtgatgggctacgccggcttctgagacattcgcgtgcctgcgtctggtgacta

SEQ ID NO: 1321 - DNA, 411 bp, Chlorella vulgaris
ccacgcgtaagcacaagtttgtgggcgccgcgctggaggggctgaagctggagggcatggacgctctgcctgctgagctgctgggtgctgtggacgaggcggagaagcagagcgggcgcgccctggacgcagataatgatcagggctggcaggtgctgacgtctcggctggaggcgattgatcgcaagtacgggctgcaggacaggactaaggtccgcgacgacgccatctttgacatgtacaagagccacatcaagagcctgcgagctcatgtggaggacgacatgaacaaggcgcgctccaacgacgacctggagtggatcacccccgatgtctccaccctcaagcccaagctggcctgagcagccactcgagcttggtgctgtcttgagccactctgcaacggggcat

SEQ ID NO: 1322 - DNA, 126 bp, Chlorella vulgaris
acctgcacctgtggctgaccactgatgacgtgccgcgagggttcaacctgatctcgcccgccgggccggtggtgcaggagatccacgtgttccaccagcttgactatgaggctatcatgcataccg

SEQ ID NO: 1323 - DNA, 274 bp, Chlorella vulgaris
acccacacgtccagtctaaaaaaaaaaaaaaaaaaaaaaaaaaaaaaaaaaaaaaaaaaaaaaaaaaaaaaaaaaaaaaaaaaaaaaaagaaggcaaaaaaaaagagtaaaaaaaataaataaacatgaataaaaagatcaatggggggcctgtcaagtggtttaattttactttacttgacttggtatttaaatattttttctttggattcccctaaatttattcaattgactgtctttttataaaatcttccttggaaaaaccggtgtttta

SEQ ID NO: 1324 - DNA, 363 bp, Chlorella vulgaris
gcgtccggaagcatgagggtatcgctggggtgctggagggctccaagtccaaggcccgcaagttcacggagaccgtggagctccagattggcctgaagaattatgacccccagaaggacaagcgtttcagcggctctgtgaagctgccttactgcccccgtccccacctgaaggtgtgcgtgctgggtgaccacaagcactgcgaggaggcccagaacgcgggcattgacgcgatgagcgtggatgacctcaagaagctgaacaagaacaagaagctggtcaagaagctggccaagcagtatgccgccttcctgtcctctgacagcgtgatcaagcagatcccgcgtctgctgggccccggcc

SEQ ID NO: 1325 - DNA, 353 bp, Chlorella vulgaris
  unsure (1)..(353): unsure at all n locations
cgcgtccgaaggtgaagtacgctaaggaggtggacaacgccaccaaggccgccagagcccgggggtctggactccgcgtgcacttcaagaacacgcgcgagtccgccgcagccatccgcggcaagagcctggtgaacgccaaggcgtacctggaggctgtcattgatcacaagcgctgcatcgcgttcctgcgctacaatggtggcgtgggccgcaccagccaggctaagaatgagggcaacaagatcggccagggccggtggcccaagaagagctgcgagttcctgctgggcctgctcaaaaatgccgagagcaatgcanaggtgaagggcctggacactgacgccctgtac

SEQ ID NO: 1326 - DNA, 455 bp, Chlorella vulgaris
cgtccgcaaacgagtccgcccacgcgtctggcaaaagatccacgatgcacaacggccttggtctcctccggcctccgtgccgccgtccccaccgctggcaagggcacccgccaggtgacccgcgcctctgtggactggtacggccctgaccgcgccaagttcctgggtcccttcagcaaccccccctcttacctgaagggtgagttcgctggcgactacggctgggacacctctggcatgtccgctgatcccgagaccttctcccgctacagggacgttgacgtgatccatgcccggtgggccatgcttggcgccctgggctgcgtcgtgctcgagctgctggcacgcaacggcaccgtcaactttggcgagaacgccgtgtggttcagcgctggtgccgccatctttggtgatgactggctcaactaactttgcaacccctccctcatccacgc

SEQ ID NO: 1327 - DNA, 443 bp, Chlorella vulgaris
cccacgcgtacgcagacttgtcctcgccgccaggaggcctcttcgagccctgcctggctatcccacttaggacaagatgccgcctaagcgtaggagctctcaggaggagaatgtcaccctgggccctgccaccagggagggtgagctggtgtggggtgtgtgccacatcttcgcgtccttcaatgacacctttgtgcacgtgactgacctgtccggcaaggagaccctggtgcgcgtgactggcggcatgaaggtcaaggccgaccgtgacgagtcctccccctacgctgccatgcttgccgcccaggacgtggccgctcgctgcaaggagctgggtgtgaacgctctgcacatcaagctgcgcgccactggcggcaaccgcaccaagacccccggcccaagcgcccagtccgccctgcgtgcgctggcccgctctggcctca

SEQ ID NO: 1328 - DNA, 458 bp, Chlorella vulgaris
ttcgcgcggccacccacgcgtacgcagaggagcaccttacaatggctccttcagggaagaaggatactaaggccgccaaggcggcaaaggccgtcaagaagtcccaatggaagaagactcgcaagccccgctacagcgtggtcttccacaggcccaggacactcatccgctccagggaccccaagtaccctaggcagagcgctccctccctgcccaagatggacgccttcagcgtgatcaaggcccccttgaccaccgagtcggccatgaagaagattgaggacaacaacaccctggtgttcctggtggacgtgcgcgccaacaagaagcagatcaaggacgccgtggcccgcttgtatgacatccagacgcgcaaaatcaacaccctcatcaggcccgatggccagaagaaggcctacgtgcggctgacccctgactatgatgccctcgatgttgca

SEQ ID NO: 1329 - DNA, 281 bp, Chlorella vulgaris
cccacgcgtacgcagacgcgtgggcggacgcgtgggttcaagagaacctaggctgacctgccgggcccggagaatgcgacgtcgtaccataccctcatcttcctggctggctccgcctcggaacatttcatcgccgacattgacctaagccacttcgacgatgtacaggtgatagtgcagacagtgccatcctacgctcgcggctttgctgaccgtctgcctaattttgtgcaccatgagggcgtggtagggctgttcaagggtgtgagaccactgtgggg

SEQ ID NO: 1330 - DNA, 397 bp, Chlorella vulgaris
cccacgagtccaaccacgcgtccgcccacgcgtccgatccccgtctcgcaatagttccagggcaatcactatgcaggcaaccatgatgaagaccttcggcgccagcctgcgcaaggctgtgcccacccagggcaagggcacccgccaggtgacccgcgcctccgtggagtggtacggccctgacagggccaagttcctgggccccttctctgagggctccatccccagctacctgaacggcaatttcaccggcgactacggctgggacactgctggtctgtctgccgatccccaaaccttcgctgcctaccgccaggttgaagtcatccatgcccgctgggccatgcttggcgccctgtgctgcctgacccccgagctgctgcaaaacgccggcgtg

SEQ ID NO: 1331 - DNA, 93 bp, Chlorella vulgaris
gcgtccgccaacgagtccgaaaaaaaaaaaaaaaaaaaattcaaaagaaaaaaaaaagagaataaacacaaaaggggggaagcacaacaagac

SEQ ID NO: 1332 - DNA, 420 bp, Chlorella vulgaris
agcgagtttgggcaccccgagtggatcgacttcccccgggacgacagctacgacaccagcacgggcgcatttgtgcccggcaacggcggctcactggagaagtgccgacggcggtgggacttggcggatgcgcccttcctcaagtacaagttcatgaacgcctacgaccgagccatcatgcacctcgacaaggcgtttggcttcatctccgcgccccacaactgggtgtcgcgcaaggacgagggcgacaagatcatcgtggcggagaagggcgacctggtcatggtcttcaacttccaccccaccaactcctactccgactaccgggtgggctgctacaagcccggcccctacaaggtggcgctgagcagcgatgaggaggtgtttggggggtggcgcaacctgaccaatgacaacgat

SEQ ID NO: 1333 - DNA, 370 bp, Chlorella vulgaris
ataggaactgcatcggagcctaggtgactgactgactccggctaatggtctcagcatagacgtctattagcatgggtggcaggtagtgcgaacagggagtgacagttgagctgggctgacagggctggatgcaaaggatgtgcctgagtcttgcctgagtgctgatccagacgtctatgttgattcctcattgctgatctcccggcctgaaggctgtgtaggaactgcatcggagcctaggtgactgactgactccggctaatggtctcagcataccttgaaaaatgtttacaggtgaaaaaaaaaaaaaaaaaaaaaaaaaaaaataaaaataaaaaaattattaaaaataaaaaaatggggcggccgc

SEQ ID NO: 1334 - DNA, 368 bp, Chlorella vulgaris
cgtccgaattggagtgaccttggggtcctaaccattttcatccacggggtacggttcctttggtggttgcccggcccttggaaacccgaccaaccccaaatttacagcaatttgaagcacatttggggtgcccctgacggttaatgtcaaagtggaaaacaggaagccctcagaatgtgtaccccaactcgtaggcaagtccactgagccggccttgcaaaaaaaaaaaaaaaaaaaaaaaaaaaaaaaaaaaaaaaaaaaaaaaaaaaaaaaaaaaaaaaaaaaaaaaaaaaaaaaaaaaaaaaaaaaaaaaaaaaaaaaaaaaaaaaaaaaaaaaaaaggggggcccccccaaaggtttcaacctt

SEQ ID NO: 1335 - DNA, 379 bp, Chlorella vulgaris
cgtccgccaacgagtccgggagattaagaagtttgcccagcaccaaatgaagaccagcaacttgcccttggacttcaagctgaacaaggccgtgtggagccagggcatcaagaacgtgcccaaccgcctgcgcattgtgatccagcgcaagcgcaacgaggacgacgacgataaggaggagatgttctccctggtcaccctggccgaggaccagagcagcaatggcaagggcgtcgtggtcctggaggcataaacacacacacgcgcctcgcggggggagctgccgcagcagccagctggcaagttccgtgcctgaggatcgcgctgggcctcgcgtgggccttgcctttcaaacggttggtgtgggcggcgtttctgg

SEQ ID NO: 1336 - DNA, 322 bp, Chlorella vulgaris
acgcgtccgccatcgcatccgcccacgcgtccgcccacgcgtccgcgccctttttttttttatttttttttttttttttttttttgtccgctcctgtgggttactttcaaacgagtttcttcaattgatgccgagtataaccttgcattctaaaccctccactagaaattaactgtggaaataactccacaatatggggagcctcaatggaaatgcaatagcaattctagcaagtgcacaatggacttgatggaagatgtgagagtgctgcctctacaccagagggcaagatataagatggacgacccatcttttgccaagt

SEQ ID NO: 1337 - DNA, 408 bp, Chlorella vulgaris
cccacgcgtacggagcagcgacagcgtgcaggtggcaacagtggactgcactgttgagaagggcatctgcaacaaggcagagatccgtggttaccccacgctgaaggtgtatcaagggggcgaagccaaggaacagtatcgtgggtcgcgtgagctgtcggcactcaaggagttcctggagggccaaaagaagaccctgctggatgaaaccactgagtgatggctgcaaggatggccccgcagggtgctggttgggcctggcaggcagagtggtcctggcatataggagtgctggatgtaggcacaagggctgtgtgacattcaggcagagatatgcctggtgagcatgccttgagagttcaaggcacataagtgtctagcccacaccttgtaacacaaccggaaaaa

SEQ ID NO: 1338 - DNA, 437 bp, Chlorella vulgaris
ccacgcgaccgaacacaagacagaaggcttcttttgtaatactcagccctaccgttcaaggtcctcgcaagtgatgtgaggagtggtcatcatttcttggagtctaacggaggcgaggagctgtggcaagactttaaacagcttggtcagaattgccaaaaagaatgccgggcatgtatagcgcaccgttcttcaacgccaagaaccttttggagagggagtcactggggaagttcctaggagagctggatgccctttcaggcccattagcgggaccggccaagccgccggagctggtcaaatttagcaccaccgacacagtggggcatgcaatgcggcaactggcggcttacaacgttctggcggccccagtgagcgacgctgctagtggggaatatgtgggcatgatcgacgtggcggacctgctcaagggactc

SEQ ID NO: 1339 - DNA, 440 bp, Chlorella vulgaris
cccacgcgtacgaaagaggcaagccgggaatcgagttggccttgagccgacgcgtttgacgcccgcagcagcacctaacacacgcaccaggcaccatgctcatctccaagaagaacaggcgtgaggtgtacaagttcctcttcaaggagggtgtgctgtacgcggagaaggacttcaacctgccggagcaccccgagattgagggggtgtccaacctggaggtcatcaagctgatgcagtccatgaagagcaaggacttggtcagcgagcgctatgcctggcgccactactactggttcctgacggacgcgggcatcgagcacctgcgtgagtacctgaacttgcccagcgagattgtgcccgccacactgaagaaatcgaccaggcctctggagcgggagggcgcacgcccgccgcgcggcgacaggccgccccgccgc

SEQ ID NO: 1340 - DNA, 405 bp, Chlorella vulgaris
gcaaaatggcgagcaaggtgtccggcgaggtgctgcgtgagggtatcgctggggtgctggagggctccaagtccaaggcccgcaagttcacggagaccgtggagctccagattggcctgaagaattatgacccccataaggacaagcgtttcagcggctctgtgaacctgccttactgcccccgtccccacctgaaggtgtgcgtgctgggtgaccacacgcactgcgaggaggcccagaatgcgggcattgacgcgatgagcgtggatgacctcaagaagctgaacaagaacaagaagctggtcaagaagctggccaagcagtatgccgccttcctgtcctctgacagcgtgatcaaccagatcccgcgtctgctgggccccgggcctcaacaatgccggcaag

SEQ ID NO: 1341 - DNA, 369 bp, Chlorella vulgaris
agcacagagggctgagacatggtaccacaaggtggagcggcccacgaactgaactagggagtcccagggaccggccagctaggagggtcggggacttgggctgtcggttgggaatcatcttgtggcggcttgaaacatcacacgcacgtgcccagtccttggtagccctgcttttgcagcggaggcatgctgcactgctggagcagggtgggcgtatgcaagatgtgatgactgctgcggtgcgtgcatgctggagcggaacgctagagcgccttggttaagtgacagcggttgtagcgagtttagttgttaggcaggaattttgctactgtcaaggcaagattcaagttgtaagaagggtggaaggat

SEQ ID NO: 1342 - DNA, 192 bp, Chlorella vulgaris
gcgtccggaatccacttgctttgccagggctgtcatgagcatcggacgagataatgtcgagccaacctgtggtgggaccatgtgcatcagagcatgcattccctgttaccggcctgaaccgccacgtgttcagctagtacgctcgtcacatgtagcagcgcagcaccaagctctattcaggcctgacccgct

SEQ ID NO: 1343 - DNA, 424 bp, Chlorella vulgaris
  unsure (1)..(424): unsure at all n locations
acggacgcgtgggcgggtagccagacgcataggctacaggcagccgcccggacaacgagcggcagctagcaccgacaagctacatcatggcggtcggcaagaacaagcgcctgtccaagggcaagaagggtggcaagaagaagattgtggaccccttcagcaagaaggactggtatgacatcaaggcacccagcgccttcaatacccgcaatgtgggcaagactctggtcaccaggacccagggtaccaagatcgcctcagacggtctgaagggccgtgtgatcgaggtgtccctagccgacctgcagaacaatgaggctgatgcctaccgcaacatcaagctgcgcattgaggacgtccagggccgcaactgcctcaccaacttctacggcatggacctgnacaccgacaagctgcgctcgct

SEQ ID NO: 1344 - DNA, 330 bp, Chlorella vulgaris
cgcccacgcgtccgcggacgcgtgggcggacgcgtggggttgccttccttgacgtttacggcctcttgcacacaaacttaaacttgaaggctgtcggtctgataggcaccatgcaggctgtcgctgctcccacaaagcccgcggctttcaccgccgccaggaagccctctgcccgcccggcgactcgccttcacgcgctgaaggcagtagcccagcagcagcctgagagcgaggcacagtggaggctgcagcgccgctcacttgccagcctgctagctgctgcaccggcgctgctgcctgccagccgcgcgcttgccctactgcctgatg

SEQ ID NO: 1345 - DNA, 338 bp, Chlorella vulgaris
  unsure (1)..(338): unsure at all n locations
gcgtccgggacacagcctgcttcgtggagttacctcccaaggagcagggacaaccatggagctcacacagcgtgaggcggacgtgcagatgctgctggcggcatcgtgccacctgnggaccaagaactgcactgcccagatggagcgctacgtgtaccgccgccgcagtgacggcatctatgtgttcaacctggcgcgcacctgggagaagctgcagctggcggcgcgcatcattgtcgccattgagaacccccaggacatcatcgccatctccgcccgcccatatggccagcgcgccgtgctcaagtttgcgcactactctggcgccaaggctaccg

SEQ ID NO: 1346 - DNA, 417 bp, Chlorella vulgaris
cccacgcgtacgcacacgcgtccggccacctctactgctggcgcacaagtggtggtgtgccatgctcggtaagctacagctcaagaggaaggaagctgcacaggatgtgcccagtccaggtgcccctgctcctgaagaggagcaggcagcttggttgatcaccgatgtgcgcagcggacgacccttgccgccgtcctgccaggaccagctagccagccttgcaagtctgttgctgggtggaccaacagcggcttgccagccaccgcgccctctccccacgccttccctcctggcagcataacagggatgggctttcacagactaggattcgcaggccttcttgcatctggcaggcttgggccccattcatccggcaagccagccagcatagtggctccatccatgccttccctgggt

SEQ ID NO: 1347 - DNA, 443 bp, Chlorella vulgaris
tcccccgtcgacaccaggtccaaggttcacatgatgcagaccctcgctgcccgtttcggcgtccgcgcccctgtctcccggggcagccgccaggtgacccgctcctccgtggcgtggtacggccccggccgcgccaagttcctgggccccttcaccaaccccccttccgacctgaacggtgagttcgctggcgactacggctgggacacctctggcctgtccgccgataccgagaccttctcccgctacagggaggttgaggtgatccatgcccggtgggccatgcttggcgcccttggctgcgtcgtgcccgagctgctggaccgcaacggcaccgttaactttggccagaacgccgtgtggttcaaggcctgtgccgccatcttcggcgatgatgggctgaactaccttgggaacccctccctcatccaaggcaaatccag

SEQ ID NO: 1348 - DNA, 371 bp, Chlorella vulgaris
gtgggcggacgcgtggggcggtctgtaaggcgcattgccagaagccagcgtccgccgggcaaaacaagccaccatgaggaacgacgctggcgagattgtggatctgtgcatcccacgcaagtgctcgtggaccaacaagctcatcacggacaaggaccacgccagcgtgcaggtcaatattggtcacctggatgataatggcgtgtacactggcagcttcagcacctttgccctgtgcggccaggtccgctccaagggtgaggctgatgccgctatggacctgctctggcataagaagaatgctgagattggccagcagtgattggagcttgagcgccggcagcacgctgctgtgcacgctgtgatgccct

SEQ ID NO: 1349 - DNA, 430 bp, Chlorella vulgaris
acgcgtccgccaacacgtccggcaccgtcaagtccaagaacgtgaagaccaccgacaccagccagtggtacggtcccgaccgccccaagttcctgggccccttctccgagggtgctgtgccttcctacctgaacggcgagttcgctggtgactacggctgggacaccgccggcctgtccgccgaccccgagaccttcaagcgctaccgccagattgaggtcatccatgcccgctgggccatgcttggcgccctgggctgcatcttgcccgaggtcctgcagaggtacagcggcatccagttcggcgaggctgtgtggttcaaagctggcgctcaaatcttctctgaccacagcctaaactacctgggcaaacctgccctcatccaagcccagtccatcattgccaccctcatcacccaggtggtgctgat

SEQ ID NO: 1350 - DNA, 403 bp, Chlorella vulgaris
acggacgcgtgggcggacgcgtgggctcgactggacgtgcggcagcagcgacgatggtgctgtcgtgcgacatcgatctcctgcatcctccccaggagctggagaagcggaagcacaagctcaagcgccttgtagcttctcccaactcctatttcatggacgtcaagtgccaggggtgcttcaccatcacgaccgtgttcagccactcccagacggtggtggtgtgccccagctgcaacaccgtgctgtgcgtgcccaccggcggcaaggcccgcctcacagagggctgctccttccgcaggaagggcgattagtcaggggaggcgctacgctggcatgtggtctcaagaaagtgcgccgccgcggcttgaggactcttgccagcgggacagcgcggcctatc

SEQ ID NO: 1351 - DNA, 384 bp, Chlorella vulgaris
ttgtttagttaggtgcagcaaccatggggcgccgcccagcaaggtgctaccggcaaatcaaggggaagccgtaccccaagtctcgcttctgccgtggtgtgcctgactccaaaatccgcatctacgacgtgggcgcaaagaagtctggcgtcgatgccttcccttactgcgtccacatggtcagctgggagaaggagcacatctcctctgaggctcttgaggcggcccgcattgctgccaacaagtacatggtgaagaatgcgggcaaggacgcgttccacctccgcgtgcgcgtgcaccccttccacgtgctgcgcatcaacaagatgctttcgtgcgccggggctgataggctccacaccggcattcgcggcgccttcggca

SEQ ID NO: 1352 - DNA, 304 bp, Chlorella vulgaris
aagataggggagagccgcaaaattggtttcagtcaagatggctcagaattccatgcacgaaatccgcatctcaaatctcaacatcatctgctgcatctagaagtcaggtgatcacctgctgaacgctgcataggagcgagaacaactgaccgggcatcaacctgtgattggcaaagtcagctacaccgttcgccattgggctatcagccttaacgagaatatctcctgccatttcaccttgcgcagtgagaatgccttgcaactgcagcaagcttggcacaaggttcgggagtactagctactt

SEQ ID NO: 1353 - DNA, 292 bp, Chlorella vulgaris
gacccccagaatgacaaacgtttcaacggctctgtgaagctgccttactgcccccgtccccacctgaaggtgtgcgtgctgggtgaccacaagcactgcgaggaggcccataacgcgggcattgactcgatgagcgtggatgacctcaagaatctgaacaagaacaagaatctggtcaagaagctggccaagcagtatgccaccttcctgtcctctgacagcgtgatcaagcagatcccgcgtctgctaggccccggcctgacaaaggccggcatgttccccaccctcatca

SEQ ID NO: 1354 - DNA, 387 bp, Chlorella vulgaris
cttgggtgaccgggaaatcccccctggagaaactgggcgaacaactgggctgaccccccttcaaaaaacgggttcccatcctgaccgccaccaagttcaccccctgaattcagccctgaattttgagggaaatcccctggctgctgctagttcctcgttgttctagctcttggttggttgccggtgtgtcgctgttgtgtgaaggggaaaggcgtgaccccttggttgtctactggcagcagcagcagcacccagcagctggacggtcgtattgagatgtgtgtgacgccgcaaaattcgtaacgcaccaagaaccgagaagagcacctttaattccccctgctggttggagttttgctgcatttgcactgtacactggcgggctgt

SEQ ID NO: 1355 - DNA, 426 bp, Chlorella vulgaris
  unsure (1)..(426): unsure at all n locations
cgtccgccaaaacgtccgtggcagcagtgtgagtagagaagaggtangggcgtgctggagtgacagggctgtatgcattgtcagtagtgaatgaggatgttcaatagtggtggaggctggggctgggtgcacaaaatgtatgcggtggggcatgcccggagcatgggtacaacaacggttggaagggaaattaatgtatgcagcttcatgcgtctccacacttgttgcgcgcgtggctttgttgctgacgcggcgcatgcttcactttctggtctgtttgcgacggcaaagttggttctcttgcccatgttangtggtgggagagggctctcctcgtgcaatgcgagctcatcaccacatataggagcgactcctgattatattcatgtcagtgccgtagggctcaaacattcaaacgcttggtgc

SEQ ID NO: 1356 - DNA, 456 bp, Chlorella vulgaris
acgcgtccacgaccgcgtgggcggacgcgtggggaagttcatcaaccccaacgccgtgtcctctgcctccgagtaagcagccagcggtggtgctgcggctgggcttccacgtgtctgcggctgcgcgcgtttgatacttgcgacccgccttggcagtgaagctaagccctacatttggcagcgaatcagataatggctccgtacgagcatgcgctgttacatagggtcgccgcacagggtttcagaattggggcttggcgctggccccttgcctgtgccccaatgtggtaccgccccccgcatttttacctgtcggaattgccttacttgctgtctcagcttgggccgtttgggcgggggtttgcaggagatgggctgcaggttgtatgtgtcttggcctcaaacggaacggtcgatccgaggataccactgttgccatgttttgggtttgttgtg

SEQ ID NO: 1357 - DNA, 362 bp, Chlorella vulgaris
cacgcgtccggcacgtcctagcggccatagtcagttgttgcctctggaagaagggggaccatgaccaccaagcgcaggaaccatggaaggaacaagccagcgggcgcccgtggcaaggtgaagcgtgtgcgctgcgagagttccgccgccatggtccccaaggacaaggcagtgaagcgctttgtggtgcgcaacatcgtggatgcctctgcactgcgcgacatccaggatgcacaggtgtacaacgagtacatgctgcccaagatatacaggaaggtgtactacagtatctccgccgccatccactcccgcatcgtgcgcgtgcgctcccgcaagaaccgccgcaaccgcgagccgcccaa

SEQ ID NO: 1358 - DNA, 143 bp, Chlorella vulgaris
cactcgtccgatagaccattggttatggactgtgtggtgctgggagcgagttggctttacacgtcctgtgtgaactggggctcgctattcacactcgacttgtgcactggttggagcggttttgggagtttcacgtctgacac

SEQ ID NO: 1359 - DNA, 353 bp, Chlorella vulgaris
  unsure (1)..(353): unsure at all n locations
gcgtccgccaacacgtccggagcggctaaacttgggcttgacgcagcggagggaacgggcggcgctgttgcagtttggtgccccgggcctagcggggtatgctgctgatctgggttgagctggcaataagggcacgcactgtatatgcaaccgcaaagctctatctggcgtataaatgtttcaaccgctcaaatctgtgcaaccattgctttgtcttttgtacacccactatgcgccagtgctgtanggggatgtgaccatccccggcccgcctattgtaacatgtgctgtgctaccaagtgtggtgttatgggaagcggcaagcctgggctacgccaaaaatgtctgccaac

SEQ ID NO: 1360 - DNA, 408 bp, Chlorella vulgaris
cccggtccgaccaacgcgtccacggacgcgtgggcggacgcgtgggctcgtggaatcccccgtcgacaacaggtccaaggttcacaagatgcagaccctctctgcccgtttcggcgtccgcgcccctgtctcccggggcacccgccaggtgacccgcgcctccgtggagtggtacggccccgaccgcgccaagttcctgggccccttcaccaaccccccttcctacctgaagggtgagttcgctggcgactacggctgggacacctctggcctgtccgccgatcccgagaccttctcccgctacagggaggttgaggtgatccatgcccggtgggccatgcttggcgcccttggctgcgtcgtgcccgacctgctggaccgcaacggcaccgtcaactttggcgagaa

SEQ ID NO: 1361 - DNA, 392 bp, Chlorella vulgaris
aggctgtccttcgacccttgatatcctaacgacgtcgagatggtgtcctgcactgcccaggctgcgctgcagagcactgctttcgcggctaagacccgcgtcagcagggtcacccgcagggccgtcgtggtccgggccgagaaggagaacacccagatcgaaaaggcggaccgcgttgccaagagcggcggccccatctatgtgaacgccactgatggctctgctctgtcgtaccttgacggcagccgccctggcgacttcggtttcgaccccttgggcctcctggaccccgccaccggctctggcggcttcatctcgcccgagtggctgacttactccgaggtcatccactgccgctacgccatgctgggtgccgggggctgcatcggccc

SEQ ID NO: 1362 - DNA, 433 bp, Chlorella vulgaris
ggcctcaccatggtgaaattccccaaagaagttgacaaacccaacaaaggccccaaaggcccggggtccgaactccgcgtggacttcaagaacatccccgaatcccccgcaaccatcccccggaataaccttgttaacgccaagggctacctggaagctgtcattgatcacaaaccctgcatcccgttcctgcgctacaatggtggcgtgggccgcaccagccagtctaagaatgagggcaacaagatcggccagggccggtggcccaagaagagctgcgagttcctgctgggcctgctcaaaaatgccgagagcaatgcagacgtgaagggcctggacactgacgccctgtacgtgtctcacatccaggtcaacaaggcgcagaacgggcgccgcatgacctaccgcgcacacggtcgcatcaacccctaca

SEQ ID NO: 1363 - DNA, 460 bp, Chlorella vulgaris
tcccgggggcccccacgcgtccggtagaatcccccgtcgacaacaggtccaaggttcacaagatgcagaccctctctgcccgtttcggcgtccgcgcccctgtctcccggggcacccgccaggtgacccgcgcctccgtggagtggtacggccccgaccgcgccaagttcctgcgccccttcaccaaccccccttcctacctgaagggtgagttcgctggcgactacggctgggacacctctggcctgtccgccgatcccgagaccttctcccgctacagggaggttgaggtgatccatgcccggtgggccatgcttggcgcccttggctgcgtcgtgcccgagctgctggaccgcaacggcaccgtcaactttggcgagaacgccgtgtggttcaaggccggtgccgccatcttcggcgatgacgggctgaactacctgggcaaaccctcccacatcca

SEQ ID NO: 1364 - DNA, 459 bp, Chlorella vulgaris
  unsure (1)..(459): unsure at all n locations
acggtccgagcttcncgggggcccccacgcgtccgcaacgcgtccggcagggcttcaccatggtgaagtacgctaaggaggtggacaacgccaccaaggccgccaaggcccgggggtctgacctccgcgtgcacttcaagaacacgcgcgagtccgccgcagccatccgcggcaagagcctggtgaacgccaaggcgtacctggaggctgtcattgatcacaagcgctgcatcccgttcctgcgctacaatggtggcgtgggccgcaccagccaggctaagaatgagggcaacaagatcggccagggccggtggcccaagaagagctgcgagttcctgctgggcctgctcaaaaatgccgagagcaatgcacacgtgaagggcctggacacggacgccctgtacgtgtctcacatccaggtcaacaaggcgcacaaggggcgccgcaggacctaccgcg

SEQ ID NO: 1365 - DNA, 454 bp, Chlorella vulgaris
ggtccgagcttcccgggggcccccacgcgtccgataagctggtggcactagtggccaatagtggggatggggcctcaggtgctcctttcagcgatgggtgtgtagcaatggccggcagccttgatgcaagtgagccctgccaccctcatccgcacgagcgccagcaaaaataagcggcaggaaccgcagcactgatagcagtatgtttcagcaccgagtgctgtcgagggggggagggggacaaccagccaggatgggccgagtgtcgcagctgcatggagggtacctaagcgttgcagaaaactcaaaagtcgcgtatattccaggtatcggataagccatggaaagacagaaagggcagctagccagctagctttgcagtaccatcagtgctggatagttaagcaatttcttaggataggacagacagcctcgggcttaagaaagtgtgccg

SEQ ID NO: 1366 - DNA, 147 bp, Chlorella vulgaris
acgcgtccgccagcgcgtccgcccacgcgtccgaaaaaaaaaaataaaaaataagaaaaaagaaacaacaaaaaaaaaataaaaaacgaagtggagcatccctaaggattcaaaccttccataaggggggggcccaacttggggggg

SEQ ID NO: 1367 - DNA, 427 bp, Chlorella vulgaris
cattgcatctgctgaggaccgaaacggacaaccatgcagattttctgcaaaacagacaggactcatgtccttgagcttagctccgaggccactgtggccgatgtcaaggctgccatcgaggccagccagggcatcccctgcgatgcgcagcgtgtgatgttctctggtcgccagctggaggaggaggcctccctggccgcctgcggcgtgtctgacgacagccagctgtacatcctgatgcgcctgctgggtggtgccaagaagcgcaagaagaagacctacaccaagcccaagaagcagaagcacaagcacaagaagatcaagctcagggtgctcaagttctacaaggtagacgacagcggcaaggtgcagcgcctgcgcaaggtttgcccccagtgcggccccggcatcttcatggccacgcact

SEQ ID NO: 1368 - DNA, 421 bp, Chlorella vulgaris
gacccacgcgtccagcgcccccgcccgcgtgggcctggtggcccccaacgacgtgaccatccccgccggcaacaccggcatggacccctcgcagacctccttcttccaggccctcaacatccccaccaagatcaacaagggtactgtggagattgtgtctgacgtggtggtgtgccgccagggcgagaaggtgggcggctctgaggccaccctgctgtctaagctgggcatcaagcccttcgagtacggcctggtcatcaagcaggtgtacgaggacggctccatctacgaccccaaggtgctggacatcaccgacgacgacctgggcgatgtcgtgaccgctgccatccgcaacgtggccgccgcctgcctggccctggacttccccaccctggcctcggtgccccactccctggtcaac

SEQ ID NO: 1369 - DNA, 393 bp, Chlorella vulgaris
accaacgcgtccactggccctgatgccacacccggagcggtgtttcctcatgtggcagcatccctggtaccccaaggatattggtttggacgccagaggacctggtccctggctcaagctattccaaaatgctcgggagtggtgcgactcactgcaaaggtaacctggctgatcagtcgtcgttttatgttctaagcagccgtatcagtgcacagccggctgcaagcttcgcgaagcaacttgttgggccccaaggccagtggacacatgtttgacttcatatttagtgtgacttggtcttgtcattggggtcaccgagtacggtcactatgctctgagtacgactgctaatttagttggcagcacttaaaggtggtaacgcccccattgttt

SEQ ID NO: 1370 - DNA, 260 bp, Chlorella vulgaris
acgtttatcgtggccatttgggctggcttggaaatctgccgtccagcttagctggctacagcaggtcttgccatatgtgttgtgtctgtgatttgattttcctcccttggtgccccccggtctgttgacttgtagtgtgttccaccttttcatgctctctgctcctagttgcccaggcgtccatatgacgaccctcggagatttcattggacctcagtgaactttgagctcaaaaactctgttaaggaagtgttcctcgc

SEQ ID NO: 1371 - DNA, 445 bp, Chlorella vulgaris
cttcgccgaccccttggcgcccaagcccaataaaggcgaatggaaagggaaccgggcgcaaaacaactaatccaacgagaacattccccaaggacggcgcatgcgttccattgaagacgcgattgaaaagctgtccaagtgccacccggagcacattgcgcagtacgggtacggcaacgaggagcggctgaccggcaagcacgagacatgcgacatcaacaccttccgctacggcgtggccgaccgcggctcgtccatccgcatccccctgccggtccagctggccggcaagggctatctggaggaccgccgccccgccgccaacgtggacccgtacaccgtggcccgcctcctcataaagaacaccatcctggcttgaagcccgcccacctgcctagcgtgcggcccaggctaaggcttgctacccccgcaagggacttgacca

SEQ ID NO: 1372 - DNA, 412 bp, Chlorella vulgaris
  unsure (1)..(412): unsure at all n locations
tcgccgacnccttgggcaacaaaaagtttcaactgggaaaaggtaacggctaaaggggtaacaatctcagagcccttcgcccttgaaaccgactggaactacaagctgtttgccaacccgtcagccaacgcgcctgggacctggtagtgatagaggggcccatatgcgtgctttgtagtggacaaataagcgcctttgccgggctcggctgtcaggtctactctcagtgcccaccggcaagggtacagggaaatggcgccctcatgggcacttcgcgtgcgtgcgggtgggaccaggcttgggctactgctgcatgggtgaccgggagtgacgctagccagccccttagcccggttcgcaagcattgtaaacaatggattgttaggtcaacatgggatgtagttgccgcggt

SEQ ID NO: 1373 - DNA, 426 bp, Chlorella vulgaris
gtcgccaaagcgtccgtattcttgggggctccaactggcgctcctgcaaatccttttgtatatgcttaagcatgcgagaatggtgtttgacctatcatgtctagagttatagctccgacaagttctttccttaacctctgcttcctcactggctcataaagcacctttgtgcacatcgcttgcgcggcgcgtgcgtcccaagttagcacaacacgtgtgctgtgagcctacggtacttgcagtaatgcaagcaaggcaccctataaactcctccctgcctgtgcaaatgcgctgtgcagcaaaaccagcatcgttccaattcgtgattttgtggtaccactttgctatgcccctgttgtgttttgggcttgccttctctttgctctttctccttgtgaacccgtaccggtaattatcggctttgtg

SEQ ID NO: 1374 - DNA, 401 bp, Chlorella vulgaris
ttccgtgtgcaccacgcgtccgccagcgcgtccgaaaaaaaaaaaaaaaaaaaaaaaaaaaaaaaaaaaaaaaaaaaaaaaaaaaaaaaaaaaaaaaaaaaaaagggggggccgcccaaggggttcaatcttcccttccttgggcttccaatttcatgctcctccaatgtttcccctaaatttcatttaattgcctgtcttttttaacgttcgtgctgggaaaacccttgcttttccccacttaactccctttccctctaaccccttttcctcaagcgggcttatttctaaaggggcccgcccgtttccctttcccaaatatttcccccccttaattggatattggaaccccccctttaccggccatttatcttgcgcggttttgttggtaaccccctctt

SEQ ID NO: 1375 - DNA, 403 bp, Chlorella vulgaris
gaccaacgcgtccagctgctacgggcagccgtgaggccttgccatcagttttagcctaaggggcaacggccgtgggaagtggcagggctggctgatcaaccctcggcaggaggatgtgggctaggtgaggtgaatgcacactatataggcttagtactgacacaccttggtaccctgctgcgtctcggcttctttgccttttttgaacactctgctgtgggcggacgtgcccggcttttctgcactggcacacttttcactggcgtggtcggcacaggagcgggttgcagccttgttgcaagctcgtgccagcgttgcgctcgagcctacgcgttgttacctcttttttgctgcttgcatgcctgtgacttcacttacagtgaattgcacgcctgtgctggtg

SEQ ID NO: 1376 - DNA, 464 bp, Chlorella vulgaris
acgcgtccgccaacacgtccgggagctgtccttcgacccttgatatcctaacgacgtcgagatggtgtcctgcactgcccaggctgcgctgcagagcactgctttcgcggctaagacccgcgtcagcagggtcacccgcagggccgtcgtggtccgggccgagaaggagaacacccagatcgaaaaggcggaccgcgttgccaagagcggcggccccatctatgtgaacgccactgatggctctgctctgtcgtaccttgacggcagccgccctggcgacttcggtttcgaccccttgggcctcctggaccccgccaccggctctggcggcttcatctcgcccgagtggctgacttactccgaggtcatccactgccgctacgccatgctgggtgccgcgggctgcatcgcccccgagattcttgccgccgccggcgtgattcccatgagccaggaggaggtga

SEQ ID NO: 1377 - DNA, 443 bp, Chlorella vulgaris
ctctctgcccgtttcggggtccgcgcccctgtctcccggggcaaccgccaagtgaaccgcgcctccgtggagtgggaccggccccgaccgcgccaagttcctgggccccttcaccaaccccccttcctacctgaagggtgagttcgctggcgactacggctgggacacctctggcctgtccgccgatcccgagaccttctcccgctacagggaggttgaggtgatccatgcccggtgggccatgcttggcgcccttggctgcgtcgtgcccgagctgctggaccgcaacggcaccgtcaactttggcgagaacgccgtgtggttcaaggccggtgccgccatcttcggcgatgacgggctgaactacctgggcaacccctccctcatccacgcacagtccatcgtggccgtgctgctctcccagattgtgctcatgggcctgg

SEQ ID NO: 1378 - DNA, 242 bp, Chlorella vulgaris
ccgggcgacttcatcattgttggcgacctgatgaaatccctgcagctgctgatgtacaaggccgaggagggtacccctgaaattcgtgccacggaattcaacgccaactgggatgaccggtgcagccatccttgaccatgacacatacataggcggcgagaatgactacaacttgtttgtggtgcccaagaacagcgaaccagcaacagattaagagcgtgcccggttagaggtggtgggac

SEQ ID NO: 1379 - DNA, 413 bp, Chlorella vulgaris
cacgcgtccgagaggaagctggcagtgccctttgtgggcatagtggtggcccaacatgtgatgaactctgccaagggcttcctgcttggcaacctgccccccaggtactacctgtaacttgtggagatccctgcagccattgccgtgctgggcacactggccacgctgctgctgaccaggctgcaggacgtgctgccatataccgcttacagggaggctgctgcacttgacggtgcaaacggaactggaatgggtggcacatgaggactggccgcagcatatcatcaggcacagcccaagcctgtgtacgggccatgtcgtctcaccaacacgcgttgaagcagacatgtggaatccacaaatgatgcagcagtacaagcgtgctgtgcaacggcattgtaagccaagggaac

SEQ ID NO: 1380 - DNA, 187 bp, Chlorella vulgaris
cacgcgtccggcatgacaccaccctagctaacgatggcctccacctatgacctgcaccgtcccttgcgcgcctctgctcgccagtgagggctgccccggtccttctctgttccgtcagtgtccacgccgccgggggtcccgtgtggctgcccggctccgttttcccggtgcacatggctaatgtcca

SEQ ID NO: 1381 - DNA, 435 bp, Chlorella vulgaris
cgtcgagatgtggaggcgttttatatataaaaatgcctcccaaatttgatcccaactccattgtggaggtgtacgtgcgtgccaccggcggtgaggtcggtgccgcatcctccctcgcccccaaaattggtcccctgggtctctcccccaagaaggttggtaaggacattgccaaggagacgtccaaggagtggaagggtctgcgcgtgaccgtcaagctgacggtgcacaaccggcaggccaaggtgaccgtcatcccctccgccgcggcgctggtcatcaaggcgctcaaggagccgcccagggacaggaagaaggagaagaacatcaagcacagcggcaacctgtcaatcgatgacgtgatcgagattgcgcccatcatgcgcaaccgcagctgcgccgcctcctttgccggcaacgtcaacgaaattctgg

SEQ ID NO: 1382 - DNA, 224 bp, Chlorella vulgaris
tcgtccagacaggcgtccgatttatttagcagcaatatatttataattaaatatttttagattattaatattaaacatttttagggatgaccttaaaagtaacatttgactaagatgtggctttttatattcgaattatgattaataattttcatattttagaatatgttattatttagtgtgataagttatcacttttattttttacggattttttatgacct

SEQ ID NO: 1383 - DNA, 387 bp, Chlorella vulgaris
agcttctccctcttcccagccctaatagggatcatatcggcacgaaccgtcaacatgccgaagacggtcgtggttgattgccggggccatatgcttggccggctggcgagcatcctcgccaagcagctgctcagcgggcagaatgttgtctgcgtgcgctgcgaggagatcaacatctctggcggcatggtcaggcagaaaatgaagtatgagcgcttcctgaacaagcgcatggttaccaaccccaggagggctgcctacaagttcagggcacccgcccgcatcctgtggaggactgtccgcggcatgatccctcacaagaccccccgcggcgcagcagccctggaccgcctcaaggcctttgagggtgtgccccacccctacgac

SEQ ID NO: 1384 - DNA, 426 bp, Chlorella vulgaris
aaggggtgaaacatggcacccaagaagaaggttgcggcccctcctgccgcggtcaggaaggccgctcagccggccaagcccgtgaaccccctgtatgagaagaggccgaagaccttcggtatcggtggtgccctgccacccaagaccgaccttcaccgctttgtgaagtggcccaagtatgtgcgcatccagaggcagaagcgtgtgctcaaccagcgtctcaaggtgccccccgcactgaaccgcttcacccgcacgctggacaagaacatggccgagagcctgttcaagctgctgctcaagtaccgccccgaggacaaggcagccaagaagcagcggctgctggctgaggccgaggcccgtaccgccggcaaggaagtggagaagaagaagcccgtggtggtcaagtttgggctgaaccacatc

SEQ ID NO: 1385 - DNA, 438 bp, Chlorella vulgaris
ccgggtagatttaatcaattagggttggtgcaaccctggttccaattcaaaacgggcaagggtccctccgacactgcggctttcgtggcagacctgtgaaggtagcacggccttcccttcccaggaccactaccaagacggcggtggtgactgtggcaagagccaccaccaagcaggcatatatctgcatagactgcgggtacatctaccagggcaaggagccttttgagagcctgccctcgtcctacagatgcccagtttgcaatgcgccaaaacggaggttccaggcctacgacggcaaccgtgggaagaacgactcaaagtctatgctatcccgcatgcaaaccatccgtggagggggcaggagcagcagccgagcctccgcctcagccgctgctgctggggtagacaaggatgacaaaaacttcctgctcacaa

SEQ ID NO: 1386 - DNA, 335 bp, Chlorella vulgaris
cacgcgtccgccaacgcgtccgctgggcaacccctccctcatccacgcacagtccatcgtggccgtgctgctctcccagattgtgctcatgggcctggttgagggctaccgcgtgaacggcggccccgctggcgagggccttgacgccctgtaccccggcgaggcctttgaccccctgggcctggccgacgaccccgacagcttcgctgagctcaaggtcaaggacatcaagaacggccgcctggccatggtgtctatgcttggctttggcgtgcatggcctgctcaccggcaagggccccctgcagaacctggctgaccacctggctgacccca

SEQ ID NO: 1387 - DNA, 235 bp, Chlorella vulgaris
cacgcgtccagatgcgggcacttggactgcaaccatgccgaagcagattgaggagatcaaggagtttctcctcaccgccaggcgcaaggatgcccggtctgtgaagatcaagaagaccggcgatgtgaccaacttcaaggtccgctgctcacggtaccggtacaccctctgcgtaaccgactccgacaaggcagacaggctcaggcatttcctcccgcccggccggcatttccag

SEQ ID NO: 1388 - DNA, 338 bp, Chlorella vulgaris
cacgcgtccgaaatggtggtggcgcgcgtacttcaccagcggcagcagcgcgctgtacctcttcctctattccatgttctacttctataccaagctggacatcaccaagctggtcccagccatgatgtacttcgggtacatgagcatcgtgagcatcaccttctttgcgctcacgggaaccatcggcttctactccacatacattttcgtgcgcaagatttacgctgcggtgaagattgactaggccggagtgaccaagccagccctctggccagttagggttaggtgcccagcccttcggtggatctacgggacggtgggtgaaatgttggtagggt

SEQ ID NO: 1389 - DNA, 415 bp, Chlorella vulgaris
actcaagcagccccttcagttgcttgcctgcctgatcacttctcagcaaccttgggggccggcgtcatggcgacgcctccactagagcgctctgcgcacaagcagtattgggaagatcactcttcagaggccacagtcgaggcgatgatgctggactccaaggccagcgtaatcgataaggaggagcgccccgaggtcctgcagctgctgggcgatgtggaaggcctgcgcatagtggagctgggtgctggcattggcaggtttactggcgagctggctcgcacagcggacagcgtgctggccattgatttcatggaaaacctcattgagcagaacaaggcaaacaatggcgacagggagaacgtgcagttcagggtggctgacgtgacggagctggagctgcaagctggggcct

SEQ ID NO: 1390 - DNA, 486 bp, Chlorella vulgaris
  unsure (1)..(486): unsure at all n locations
acggtcgcattccggggncnncagcgtccgccagcacatcagcagccatgggtatctcccgcgactcgcttcataagcgccgggcgacgggaggcaagcagaaggcttggcgtaagaagaggaagtatgagctcggccgccagcccgccatgaccaagctgtcctccaacgtgacagtgaggcgtgtgcgcgtgcgcggaggcaactctaagttcagggcgctgcgcctcgactcgggcaacttctcctggggctccgaggccgtgacccgcaagacccgtatcctggatgtgtcttacaacgcctccaacaacgagctggtgcgcacccagaccctggtcaagaacgccatcatccaggtggacgcaacccccttcaagcagtggtaccaggtgcactacggccaggaggtcggcatcaagaagaaggccgccgcagccgccgcagccgccgcacccgccgagggcgaagcgcccgccgccaacc

SEQ ID NO: 1391 - DNA, 423 bp, Chlorella vulgaris
gaccaacgcgtccacaatccgtctctggagccttccccggctgagaaggagacgtcaacatggtggctgccagcaagaagagcaagaagtctcatgagagcatcaactctcgtctggcgctggtgatgaagtccggcaaatataccctgggctacaagaccactctgaagactctgcgcaacggcaaggccaagctggtgattatcagcaacaactgcccggctgtgcgcaagtctgagatcgagtactacgccatgctctcaaagactggcgtgcaccactacaatggcaacaacgttgacctgtgtacagcctgcggcaagctgcaccgcgtgtcagtgctgacaatcaccgaccctggtgactctgacatcatcaagaacaccagcgagtaagtgctcacctagcaagagggggtgctgg

SEQ ID NO: 1392 - DNA, 436 bp, Chlorella vulgaris
taccaatccatttccgcgggcctgcctggaattcgagcagcaaatgctgcgccaggcagtaagggctgccgccaagcagtgccgcagcgctgctatccccgcaggtgcagccttggccactgctggccgcagtagtgttgcaactctccctggcttgctaaaccatggcaaacccatggccattacagctccccggtgccttgctgcaacaaccatgggcggctcattagcatttgccgcctcaaaccaggagcgccccttcattagggtcaaccctgaagggtttcaaaagggtccgggtgggggaatcattcgacgctatgaacccaagggatacaagctagttgggaataagggttcttataccctccgccgactttgctaagctacactatgctgagcacgagggcaagcctttctccccaagctggtggac

SEQ ID NO: 1393 - DNA, 171 bp, Chlorella vulgaris
ccgcggacgcgtgggcagcattgtgctccggtgctggcaattgctgtgagcttactatcattgctggagaaaacagctgaagtagtcctgagttgctgaacatgttgaaaacataggggcacatattacaaaacaaacaaaattacaacacaaatgaaaaaaaaaagacaa

SEQ ID NO: 1394 - DNA, 416 bp, Chlorella vulgaris
gctataccgtctcggcacagttaaacatgcagaccgccatgtcccagagggcttttgtcgccgcacagcccgtgcgcgctgcccccaaggccacccgcgcagccaggtgcgctgtggtgctgcgcgcctccgctgaggagtctcgccgcgcagtgctgggcggcctgctggtcggtgctgtggccctgaccgcaggcgccgccaacgtcgccaactacattatcgatgaccccatggccatcgataaaggcttcaactggacgtatgacgcacgctacaccgatctgccccataacgtgcgtgacggtctgacccaggcacgcgccgaccttgagggcctcaagaatctcattccgtcagcgagaagaagatccacacagagctggagtcctacatcaagaaaaactactggactg

SEQ ID NO: 1395 - DNA, 451 bp, Chlorella vulgaris
acgcgtccgaaggtcgacaacaggtccaaggttcacaagatgcagaccctctctgcccgtttcggcgtccgcgcccctgtctcccggggcacccgccaggtgacccgcgcctccgtggagtggtacggccccgaccgcgccaagttcctgggccccttcaccaaccccccttcctacctgaagggtgagttcgctggcgactacggctgggacacctctggcctgtccgccgatcccgagaccttctcccgctacagggaggttgaggtgatccatgcccggtgggccatgcttggcgcccttggctgcgtcgtgcccgagctgctggaccgcaacggcaccgtcaactttggcgagaacgccgtgtggttcaaggccggtgccgccatcttcggcgatgacgggctgaactacctgggcaacccctccctcatccacgcacagtccatcg

SEQ ID NO: 1396 - DNA, 419 bp, Chlorella vulgaris
cacgcgtccgagagcgcgtgggcggacgcgtgggccggctggctggtgcccgctgctagccccgcccctgccttcggcggtcgctctctcctgagtgtgttcaccgagagcatcggccaggagcttgcccacttccccaccggccctgctctggactcccagttctggctctacctggccattttccatgttggcctattcgccaccatgttctttggtctgattggcgtcagcgctcgcatgcagggctactttgacaagtagatgcctcgacggccgtgtggcatcggacttgtgttaggggacaggctttgtgtacactgagaagaaaatgcaattaggtgtcttccaccgtgcatgtggcctgttaatgtacagggtggggacacgtgtaggtactacgctgtgccaggctgtgc

SEQ ID NO: 1397 - DNA, 446 bp, Chlorella vulgaris
cacgcgtccagaagaactacctgggcaacccctccctcatccacgcacagtccatcgtggccgtgctgctctcccagattgtgctcatgggcctggttgagggctaccgcgtgaacggcggccccgctggcgagggccttgacgccctgtaccccggcgaggcctttgaccccctgggcctggccgacgaccccgacagcttcgctgagctcaaggtcaaggagatcaagaacggccgcctggccatggtgtccatgcttggctttggcgtgcagggcctgctcaccggcaagggccccctggagaacctggctgaccacctggctgaccccaccgtgaacaacggctttgccgtggccaccaagttcacccccggcaactgagctggttgtcttgacggacgtttggctgtgctgcttgacaggctggaggtcagcattactatg

SEQ ID NO: 1398 - DNA, 414 bp, Chlorella vulgaris
gacccacgcgtccaggaagagctccagaagatgcagtagtggaagccgctggccagccatgcggggtggcgtgtctgtactcgacttggagtcagcagcgggaagtgccagccatggacgcgcgacagtttatgacaagtgtgcatgggcggtaataagctgccagggcacttgcgtggccaagtgctcgtgagggagagttcgtgtttgcctctgcactgactcattcaggtgaccgcctggcatcttgggatggcatttgctaaatatacaacttgcatgagaagttgtggttggcatttggctggctgctgacacttccaccgtaaggcattcttgagttgaaagtaactgggtattgtatgccagtgtggcgtgcaacgaacctttagcctgcctactgtttccaaacag

SEQ ID NO: 1399 - DNA, 464 bp, Chlorella vulgaris
acgcgtccgccaaagcgtccgctctgctatgtggtgtagatgtcatgctaactatccaaggtggtgctgcacaaactgaagatggttcggcccctttcaggaattcagaggcaggctctgagcttgtaccgcagtacactccgagttgccagacagagggaaggtggactgggcggccctcttgccgtctacgcacggcaagagtttgagaggcacagaggcgtggatcgcttaaacttccagctgattgaacacttgataaggaagggacggaaacagttggaggtgttgtcgcaggcagatgtgactgggctgcagctgaagcaagctgagcagcagcagcagcagcagcagcaccagcaaaaaaagcagtaggaaccgttgcacagagacagacacgaatagcgtggcacccttcagcggtatcaatgagtgtacccatgtgctgggggcctcgatttgac

SEQ ID NO: 1400 - DNA, 105 bp, Chlorella vulgaris
ttccctgttcgaccaacgcgtccacccacgcgtccgcggttgcttgggcggtcgcgtgggtggtcgcgtgttttctggcttgtccggtggcggtgtccccctttt

SEQ ID NO: 1401 - DNA, 438 bp, Chlorella vulgaris
cggccctcctggcgccgttaagaaaggccctcaacccggcaaaccccttaaacccccggtatgagaaaaagccgaataccttcggtatcggtggtgccctggcaaccaaagaacgaactttcaccgctttgtgaaatggcccaagtatgtgcgcatccagaggcagaagcgtgtgctcaaccagcgtctcaaggtgccccccgcactgaaccgcttcacccgcacgctggacaagaacatggccgagagcctgttcaagctgctgctcaagtaccgccccgaggacaaggcagccaagaagcagcggctgctggctgaggccgaggcccgtaccgccggcaaggaagtggagaagaataagcccgttgtggtcaaattttgggctgaacaacatcaccactcctggtggagcatggcaaggcgcagctggtggtcatc

SEQ ID NO: 1402 - DNA, 449 bp, Chlorella vulgaris
ccgtgtgaatgcgttcaaagaacctccgggtgggtaaatgggaagccggcaaggccggtaaggtttcagagtgcacagcaggtgccgctccagccgatgctgtgtgtaaaccacaatgaaggagactccttggacccacgcagaaggctgacgcctgatgctgggtagtaggtatgttttgagcctgttcacagtgtcttataacctttccgtgtaggcatgttattactgacgcttaccctgcacccgtcgtggcgtgcttttcctctaccaggatatgggtacggagatatgcttggcttaaaatatcctctgttgatgcgtgatggcttgccgtaggcagtgcaagcacggttggctagcaataatgcctccaatgctgccatgatgctatggtgtatatatgtggcctttccatgatagcttgccagctgtgcattgcaattttg

SEQ ID NO: 1403 - DNA, 373 bp, Chlorella vulgaris
cttaatgaagttaccaaatttgggaacctcaaaggtcctggcaaagggcaactccccgaacaagcaattggtgttaaaggcaaattttgtagcaacctggcgagcaaaaatcaaggcggtgggtggcgcggtacagctggtggcctaagagaccaggacagcaaagaagcagctccttgcacacagccagcccttccgctagggagtggagtgtgcaagggcgggttttggcacagcggcaggcgcggcggcggcagcagcggaacagagcggccagtggggtgcgaccctcagcagagaatagagccgtgggcaggcatctggctggcgagggctgcgtgtagttagggaaggtagcttgctgccattcggt

SEQ ID NO: 1404 - DNA, 345 bp, Chlorella vulgaris
  unsure (1)..(345): unsure at all n locations
cacgcgtccggacnctgtggccgatgtcaaggctgccatcgaggccagccagggcatcccctgcgatgcgcagcgtgtgatgttctctggtcgccagctggaggaggaggcctccctggccgcctgcggcgtgtctgacgacagccagctgtacatcctgatgcgcctgctgggtggtgccaagaagcgcaagaagaagacctacaccaagcccaagaagcagaagcacaagcacaagaagatcaagctcagggtgctcaagttctacaaggtagacgacagcggcaaggtgcatcgcctgcccaaggtttgcccccagtgcggccccggcatcttcatgggcac

SEQ ID NO: 1405 - DNA, 461 bp, Chlorella vulgaris
  unsure (1)..(461): unsure at all n locations
tcccgggtgccnccacgcgtccgagaactgaagcctggggccttggggttccctgctgcgcagccctgcctgcctgcttgaagcctttcccgctcggcgagtagcgctgtgcgggctatgctgtgtggcgctgtgttgaggggtgggctgtgatggcggcgggagggcacgctagcagcgtggcaggggtcctagggacctggctgggcgcggttggcatgtgcttggaagggtggggtgcgctgctgtggcggctgttttgccaactcttctcgggggcccaggggcaaaatttgcggctgggcagttgggctgctgcaggggcgacccccgccctggaggtgactgtgtctccctagtataaggcttgttgcattgcaatgcatggactgcagtttctggtggtgccgtggttggtatgtgttagcgtggttgccaggtggtgcggcatgcagctggcg

SEQ ID NO: 1406 - DNA, 378 bp, Chlorella vulgaris
acgcgtcggcagacactattagacagctaatctggattggcctaggttgaagggccacgtgaccgtggttgatattctttctgcacctcttgataagcatcacgtcggtcttttctatctgaatctatctgtctctatcatttttagggtgtgtgcggccctcttcctcacacagctgccccatcaagggaaagcagttgacgctgggcccactgtagtgcccactgatgttacatacaaacggttgcaaaaaaaaaaaaaaaaaaaaaaaaaaaaaaaaaaaaaaaaaaaataaaaaaataaaaaaaaaataaaacaaaataaattaattaaaaaaaaaatatctaaaaaaaaaaagggggggcccccctaaaggtt

SEQ ID NO: 1407 - DNA, 425 bp, Chlorella vulgaris
cgcgtccacggacgcgtggggtagctcaaaggactagagcccctttgtggcacctttgtcactgtgacgggcccgctgcgagacctgactgggtcagcgcattgagtgtgcaaggagggcccctaggtcacccgcagtgccgtgtgagcagtctcattaacccccttgtgcgtatgctacatcgggtgctggcaggcccacgtgggcccattggctcctgttactgttactccggacccagctggacccgtccaatgcccatgcggtggtgcctcgcccaacaacggctgggcttcttctgggtgtcgcagcaggaactcttttgcttgtttcaaaacagctgccacagggtgcggtagtcccttcatcatgattggctttagtcataaggcagcatgctttcccagctcaaatcagggtaatga

SEQ ID NO: 1408 - DNA, 396 bp, Chlorella vulgaris
gcgtccacggacgcgtggggccgtggcgacaacactggggtgcaagggcaacgctgttattgtcccaggctgcagccaggatgatggtgggagggcacctggagttagggaggcacggaagcttgcttattctccacaatgccactgggtcgatctggatgtcgtacgcaaggtggggacactggggcgtgtttcagtaccaagttgtcaccattgacctgctgtcacttgcttacggatcttttgcttgtattggtggtattggggtgcctggtgaggcatgagattttggtacatatgaaacagtagtggttgatgatgttgctcttgaaaggcttgggctaggctaggtaaattgttctagtgcttggcacctgacgcattcggctgcttgac

SEQ ID NO: 1409 - DNA, 387 bp, Chlorella vulgaris
agaagaagaatcctcccattaagaagaaccttccaaaccaacttccaaaggtttaccccccaaaggcaaagaagttaactcaacctaagaagagaacaataagaggaagaatcctctgacgaggaagagcccgccaagccagctaccaagccggctgctgccaaggctgccgctaagaaagaggagagctcctctgaggaggaggaggagagcagcgaggaggaggaatcctctgacgaggagcctgccaagccagctgccaagcctgccgccgccaaggctgcggccaagaaagaggagagctccgaggaggaggagagcagcgaggaggaggagtctgaccaggaggagcccgccaagcccgccgccaaggctgccgctgccaaa

SEQ ID NO: 1410 - DNA, 449 bp, Chlorella vulgaris
aacctgggaatttaccaatggccgccctgacggcaacctccttcgctggggcccggctccaggccaggacttccaaggtccagccccgcagccgtgctgtggcctgcgtgcgggcagacgctaccaagtatgcagctgctgccatggccgccgtgatcgccctgactcccgctgctgccaacgctggcattgttgaggacctgcttgctaagtccgacgccaacaaggacctgcacaaccagcagcgcctggccagcagcaacgccaactttgcgcgctcgcgcaccgtcagcgaccgcacctgcaccttccccaacaacttcctgggctgcgacctgggcaagtacgcgggtgacgtcaagttcattgcagacaagaagaagaccctgtgccagggcaccgagcccggcctctgcgctgacgacatgaacgccacaagtacaccaccc

SEQ ID NO: 1411 - DNA, 441 bp, Chlorella vulgaris
tcccggtgtgctccacgcgtccgccagcgcgtccgcgctgggtgttgacttgaaaatcaatgcagtggggcggtccccaggtgcactgctgaggtggttggctggccatgcggactgcgctgggaacgtgtgcctgacaaggcaggatgatgattacctaacaaggggctggcctgcagttttgtgggtgccagccggcggtgtctaggctgtgggcaattcttgaaatcactgcgcaggtgggtgttgtagttgcaggcgtaggcctctgaagtttttccttcattatggtggctggcctgcattgcgccattctgtttgactcgtgctttgaaagttatcctgcagttatgttggactttatgtaatggcataaaacaattttgtgtacattaccgtgaggtgttagcgcacgggggcagtgcaagatgctgtttcccg

SEQ ID NO: 1412 - DNA, 424 bp, Chlorella vulgaris
cacgcgtccgagagcaggcccaggaggttggtatgtgtggcatgcctgcatgcctgatatatgaccttgcttaatggtggtggtggtgtctgactggtcctgtgccttagttaagggacctctgggacacccctccagcgcgcgttttggtacgttactgatattataaggcaaggtgctaacgaagccccttcctgttggttgggttcatttgattagcagtatccgcctaagtaaagtatagctgtcacgattatggcaggttgcagtctgtgcatctctctttctctccctttgccctcggcatgtgctcggcatttactggtggcatgcgccaggcactcgtctgtctgtctccttactcccacctattggcactgtgggggatttcacttgcctctctccaactttccaaaccaagggg

SEQ ID NO: 1413 - DNA, 381 bp, Chlorella vulgaris
cgcacacgctgacgatcgagctgaccggcaaggaggacaagatgcgggcgctgcaggaagtgctggagccgtatggcgtgctggagctggcccgcaccggacgcatcgcgctgggccgtgagtcaggggtggacacgcggtacttgtcaggcgtggccggcacacgcgtcatgctctgatgatgacacaaacgctgtggtagcctcggtttaccagcgccagcgatggtgggctgggcgagctggaaatggctgggccaaggaggcgggcgtgggcaggttggaagggcaagctaggtgcagctgctgcgtgcggtggaagcgtcaaggcggtggagaagcggctggagcctcctgtcccctgcaggctatgagctaagga

SEQ ID NO: 1414 - DNA, 452 bp, Chlorella vulgaris
ctcgtggaatcccccgtcgacaacaggtccaaggttcacaagatgcagaccctctctgcccgtttcggcgtccgcgcccctgtctcccggggcacccgccaggtgacccgcgcctccgtggagtggtacggccccgaccgcgccaagttcctgggccccttcaccaaccccccttcctacctgaagggtgagttcgctggcgactacggctgggacacctctggcctgtccgccgatcccgagaccttctcccgctacagggaggttgaggtgatccatgcccggtgggccatgcttggcgcccttggctgcgtcgtgcccgagctgctggaccgcaacggcaccgtcaactttggcgagaacgccgtgtggttcaaggccggtgccgccatcttcggcgatgacgggctgaactacctgggcaacccctccctcatccacgcacagtccat

SEQ ID NO: 1415 - DNA, 460 bp, Chlorella vulgaris
gtttacagcttcataccgtcaggagccttattagtgtacgaacaccatggtggcagtgatcggcaagccagccccggctttcactgcctccgcagtggttgacggcgatattaagaccgtgtcgctcagtgactacaagggcaaatacgttgttgtcttcttctaccccttggacttcactttcgtgtgccccaccgagatcatcgccttctccgaccgcatccaggagttcaaggaggttggtgttgaggtgctgggggtgtctgtcgactccgccttctcccacctggcctgggtgaaccagcctcgcaagcagggcggcctgggcggcctcgcctaccccctgatctccgacatcaccaagagcatctccaaggactatggtgtcctgatagaagaaggcgagaacgccggcgtcgctctgcggggtttgttcatcatcaaccccgaaggtgtcctg

SEQ ID NO: 1416 - DNA, 275 bp, Chlorella vulgaris
cacacgcgtcggcccacgcgtccggcggcagctgccctccggcctgctgctggtgaccgggcccttcaagctcaacggcgtgcccctgcgccgcgtgaaccaggcttacgtcatcgccacctccaccaaggtggacgtcagcggcgtggacgccgacaagtttgacgatgcctacttcaagtctgctgaaaagaagcagcgcaagcagggcaaaaaggagttctttgctgaggccccggccaaaaaggagctgccggccgattatgtcgaaaacc

SEQ ID NO: 1417 - DNA, 410 bp, Chlorella vulgaris
  unsure (1)..(410): unsure at all n locations
gatccccgtctcgcaatagttccagggcaatcactatgcaggcaaccatgatgaagaccttcggcgccagcctgcgcaaggctgtgcccacccagggcaagggcacccgccaggtgacccgcgcctccgtggagtggtacggccctgacagggccaagttcctgggccccttctctgagggctccacccccagctacctgaagggcgagttcgccggcgactacggctgggacactgctggtctgtctgccgatccccaaaccttcgctgcctaccgcgaggttgaggtcatccatgcccgctgggccatgcttggcgccctgngctgcctgacccccgagctgctgcagaacgccggcgtggccagcttcggcgacgctgctgtgtggttcaaggctggtgcctccatc

SEQ ID NO: 1418 - DNA, 430 bp, Chlorella vulgaris
  unsure (1)..(430): unsure at all n locations
gcagcctgacggatctggggtgcagcggcagggcggagcaggagggcatggtgcggcgactggcgcaactggagcagaccgagcgggtgcagcagggcgctgacagatacaaggccgtcctgggtcaggcccaggcagagcaggcggtggagctggccaggcgtgtgcgggcgctggagggcaaggtggcctctctccagcagcgggccgacgatgcgggagtggacttgtcgctgcgggtgggcgcgctggaatggcggctggacaagagctctgctgcaactttggacaccttgaaggccctagaaagaagacaagacaggttgtacgaccggctggctggtgtgagggatacctctgctgcagctaacaactcactgtctggggagatggctaggctcagccanaacgtggccgcccactgtgtgag

SEQ ID NO: 1419 - DNA, 452 bp, Chlorella vulgaris
  unsure (1)..(452): unsure at all n locations
ggtttctacccaggcccactcccccaggcagaaacaagatggtggctctccagattctcgcagcgactgccaagggcaccgtcaagggtaccgttaagggtaccgcaaagcaggcagcgaagaccgtgaagaaggcggccatcaagaccgcaaagaaggtcgcccccaagaagggtggcgtggagtggtacggccccaacaggcccctgttcctgggcccctacagccccgagcccccgagccacctgaagggtgagttcgctggcgactacggctgggacacctccggcctgtccgccgatcccgagaccttctcccgctacagggagattgatgtgatccatgcccgctgggccatgcttggcgcgctgggctgcatcgtgcccgagctgctttgacagaccaancacgtgccctgnttcaaggctggcgcccagattctttgccccgag

SEQ ID NO: 1420 - DNA, 455 bp, Chlorella vulgaris
cccacgcgtccgggttggtggagaccctgcccatcagcagccatgggtatctcccgcgactcgcttcataagcgccgggcgacgggaggcaagcagaaggcttggcgtaagaagaggaagtatgagctcggccgccagcccgccatgaccaagctgtcctccaacgtgacagtgaggcgtgtgcgcgtgcgcggaggcaactctaagttcagggcgctgcgcctcgactcgggcaacttctcctggggctccgaggccgtgacccgcaagacccgtatcctggatgtgtcttacaacgcctccaacaacgagctggtgcgcacccagaccctggtcaagaacgccatcatccaggtggacgcaacccccttcaagcagtggtaccaggtgcactacggccaggaggtcggcatcaagaagaaggccgccgcagccgccgcagccgccgcacccgc

SEQ ID NO: 1421 - DNA, 466 bp, Chlorella vulgaris
ggaggatggcgacgcagtggtgctgttcaacttccgtgccgaccgcatggttgagataagcaaggcgctggagtatgaggacttcaagcactttgacaggaagcgctggccaaaggtgcgctttgcgggcttgatgcagtatgacggcgacctcaagctgcctaccaacttcctggtcccaccgccagcaatcagtggggtctcaggcgagttcctggccaagaacgggctgaagacctttgtgtgcagcgagacccagaagtttggccacgtgaccttcttctggaatggcaaccggagcggctactttgacgagaagctggagacatacctggagattccctcagacacagtgcccttcaacgaggccccgctcatgaaggcccgcgagatctgtgaggcgggcaaggaggccctgcggtccgggtaaatttgacagatccgcatcaactttgccaaccctgac

SEQ ID NO: 1422 - DNA, 464 bp, Chlorella vulgaris
cccagcgatagcccgcaactgtgtcggcatgctcgtgaacagcttgtatggacgggcctctacctgctggtgggactctcggagagccagtagggcatacgaatgtggtagtatgggaggctatatgtctatggccccctgacaccctggattcatgccatgtaagggaggagaacttgcccagcccttgcaccatataatatttgtttgcgtggtgcggaagcgtgctccttgacgttctccatgtctgtgccgagctgcttcagcacttggtgtactataagtagtagcattggttttcaagacggttgcatgtaccctagtactcagtcactatatgttgcagtgcctctcgtgtgtattaagatcgcccagcgaccgtgtattttgctacacccgtgtatggtcgagaagtcatgatatggtcggtgtgatacctcaattaaaattgtatctgggcaaaa

SEQ ID NO: 1423 - DNA, 453 bp, Chlorella vulgaris
cggacgcgtgggcggacgcgtgggcgcgtaacaccaccatccccaccaagaaggagcaggtgttctccacctactccgacaaccagccgggcgtgctcatccaggtgtatgaaggggagcgctcccgcaccaaggacaacaacctgctgggcaagttcgagctgaccgggatcccgcctgcacctcgcggcgtgccccaaatcacagtgaccttcgatgtggatgccaacggtatcctcaatgtgtctgctgaggacaagaccaccggcaacaagaacaagattacaatcaccaatgacaagggccggttgagcaaggacgagattgagcggatggtgcaggaggccgagaagtatgcctcggaagatgagtcacaccgcaagcgagtggaggcccgcaacggcctggagaactatgcctattccatgcgcaacaccatcaatgacacagctg

SEQ ID NO: 1424 - DNA, 451 bp, Chlorella vulgaris
gatcgcaccgccatcgatgctctggactgcagggatgctttcgcgcgccctgctaggcaggcactggaccgccggtgcagcatgtgccctagcctcgagcaggcagataaacacgtctgcatggcgcgggcacgtgcagcccgtcccagctgatattgatggtgacagtaacgcagctcccggggaggctggggtcaatggagcactgggtcaccggcgatggctagcagatctgggagccatccgcaccgactggacgagggaggaggtggccgatgtctttgctacccccctactggagctagtctatcatgcagccactgtacaccgcatgtacaacgacccttccatggtccaacggtgcactctgctcagcatcaagaccggcggctgccctgagaactgcggctactgcagccagtctagccactggagcaaagacactggtctg

SEQ ID NO: 1425 - DNA, 450 bp, Chlorella vulgaris
cggacgcgtgggcggacgcgtgggctagaggcggagcctggcagcaagattcagctggggcgggttctggcactcaagcacgatggcaagttcactgttggcaagccctacatggagggagttcgagtggaggcggagattctggaggagctgaaggggcccaaggtcattgtttttaagatgaagcctaagaagcattatcgtcgtactaatggccatcgacagcctctctcgaagatcctggtcaccaagatcagccagtgacagcggctataaccctgggattgtcccgtggtgcccgacaccatttggccgtgccatgggtgacgtgaaatcggcaaaagatggcttgtccatgttctctcttggcctctggtgtagacgcagcactcgcacatcttccatcacgttcactgtgcacttggtagaagtggtaatgcattgccaatg

SEQ ID NO: 1426 - DNA, 447 bp, Chlorella vulgaris
cacgcatattggtgagtcaggaagggctgcaaggagttacactgtaatgccttccgctgtacggcgtgttggctgtgagcagaccgtggttcacagtttgcggccctagcagttgctgtgagcctggcccgcaggcaacgggttgcggtcggggcgcaaggtgctgcggcagaagctgctggggccaacgctggtgtcctactatcccgaggatttctccaggaaggacccattcctggtggacatgaaggctgagagggccaagctcaagctggatcggttgaagcgccgcggcaaggcacctcccaagaagggctccggcaagcgtgctggcaagaataagtaggcacagcgatgcagacagtggggagcagggtagacgcaatcttttggtctgcttttataagtggccgaggggcttgggctgacaaatttgacacaagcttt

SEQ ID NO: 1427 - DNA, 434 bp, Chlorella vulgaris
gttcttcccagccagtgtcgcggtgcgcgaaatgttaggactggactctcccactttgtgcctacaggcctaaacctggtgctagtgtctcgcaccgagtccaagctggcagccatggaggaggagctgcgctccaagcacagcgtcaagctcaagcactgcgccgtggacctgtgccaggcgaccgacgccgactatgcccggctggcggaagtgctggagggggtggatgtgggggtgctggtgaacaatgcgggcatgtcgtacgaccaccccgactacctggagacaattgatgatgacttgctgagggatatcatcaccatcaacacgctggcgccgaccaggctgtccaagctggtgctgccgggcatgaaggagcggcggcggggcgtgatcgtcaacgtgggcagcggcatctccaccgtggtgcc

SEQ ID NO: 1428 - DNA, 439 bp, Chlorella vulgaris
cccttgctagctttacttgcctctgcacgaagaatatggctaccttcgcagaggctcctgcaggcgacgccgctaagggcgccaagatcttcaagaccaagtgcgcacagtgccatactgctgcccctggcgagggccataagcagggccccaacctaggcgggctcttcaaccgccagtcgggccaggcggaggggttcagctatagcaaggccaacaaggagaaggcggtgcactggaatgaggagacgctgtatgagtacctgctgaaccccaagaagtacatcccaggcaccaagatggtgtttgctggcctgaagaagcccgaggagcgcgctgatctcatcgcttacatgaaggaggcgtgcaagtagatagcctagtagctgaactaccatagcccaggacatatgggcgtacctcaaagacgcgactgcca

SEQ ID NO: 1429 - DNA, 445 bp, Chlorella vulgaris
cccacgcgtccgcccacgcgtccgcccacgcgtccgcccacgcgtccgcggacgcgtgggtggaagaagggggaccatgaccaccaagcgcaggaaccatggaaggaacaagccagcgggcgcccgtggcaaggtgaagcgtgtgcgctgcgagagttccgccgccatggtccccaaggacaaggcagtgaagcgctttgtggtgcgcaacatcgtggatgcctctgcactgcgcgacatccaggatgcacaggtgtacaacgagtacatgctgcccaagatatacaggaaggtgtactacagtatctccgccgccatccactcccgcatcgtgcgcgtgcgctcccgcaagaaccgccgcaaccgcgagccgcccaagttcgtgcgcgggggaagcgtcggcgccgcacgtggcggctaccagaggcctggcgggccccagcag

SEQ ID NO: 1430 - DNA, 455 bp, Chlorella vulgaris
  unsure (1)..(455): unsure at all n locations
cggacgcgtgggcggacgcgtgggcggacgcgtgggtgcgactagtaccttgcaatgcctttctctcttggtgtccctcctcacccaattgatcgtctagtggtagacttgttgtgttgatgagatgccctgccaggtcaggggagatgttggagtgctgcactgctctttctcgtccaatttgtgtttactgtgtgcatatagcgtacccggcttttattttgtacccagcttgaaggtgagaagcctagtctgtgttgtgggtagtgactgtccaagtggcgagttttgcccgctgcgtcccttgcactgcgatttgcgaacttaatgatttagtgttgtatttgtacagccccatactacacttagccttttgtgtagtttgtagcacgtgacttgcctgtctgtantacgtccatactgtgtccttgtgtctcgttcaactccgacagcta

SEQ ID NO: 1431 - DNA, 213 bp, Chlorella vulgaris
gctttgatcctcttaaccttggaaccgaccccgagcgcctcgcatggtacgcggagggtgagaggatcaacggccgctgggccatggctgccgtggccggtatcctggcccaggacctgctgggcaagggcaactggttcgaagccggctcccaagagtactggctgcccaacaatgcgctgctggccatccagtttctggtgctgggctttt

SEQ ID NO: 1432 - DNA, 461 bp, Chlorella vulgaris
ctcctgggtcagctgaggagcaggcatggtgctcaagacccagacttgccgcttcagcggcctcaggatttatcctggcaagggaatcctgttcatccgtgttgatggccagcaattcctcttcctgaagcagaagtgcaagagcatgttcaaccagaggaagaggcccgcaaagattgcttggaccaccctctacaggaagcagcaccgcaaggaccaggaggcgcaggttgcgcgcaagaagcgcaggtctgccaccaaggtgcagacgcgctcaattgtgggcgtgtccctggaggtgattcagaagaagaaggcagagaagcccgagcagcgcaaggcctcacgcgaggcggccctccgtgagatcaaggagcgtgccaagaaggcaaagcaggacaaggcttaccagaagggcgccgcgaaggccgctgcccccaaagcctccaagaatgtccccg

SEQ ID NO: 1433 - DNA, 466 bp, Chlorella vulgaris
  unsure (1)..(466): unsure at all n locations
gccgccggtcgcaccgtaatttgaattcagcctcatactcttgtctttgttattcaaggatattagcacatcatcatgccagccaagattggcgacaagctgcctagcgtgcagctggacgagattgtcaaaggcgacatcacgaaggtggacatctccgagctcttcaagggcaagaagggagtgctctttggcgtgccaggagcattcactcctggctgtagtaagacccacctgcctggctatgtggccaactatgagaagctgaaggcagcgggtgcagaggtggtcgcttgcgtggcggtgaacgacgtgtttgttcaggacgcctgnggacgggagcacggggctgagggcaaggtgcgcatgctggcggacccccgtgctgagctggccaaggcgctggatattgagctagacctcactgacctcctgggcagcaaaagactcacaaaggtcagcgcgg

SEQ ID NO: 1434 - DNA, 451 bp, Chlorella vulgaris
cggacgcgtgggtgctgattaagatggcaggcacggatgcggaggtccccacgtacgaggttgttgggccaacactggggccgtcaggcgctagccagatagacttgaccatccggcgtgggaagaacacattgaggctgaggctagagttcatgctgtcaggcggcaggattgttcatttgcgcaacacaagggtttgaatgctgccttccagcgcctacgtaagagtcgtgtccccattttgtccttcctgggatgtgcgagcctgtcggcacggggtgaccctcatgaggtgcttatcttggccattgcccctagtggctccccctggtggaacagtcggttgtatgtgtttcattacagtgatgatgccttgcggagcaatcacagcacacctgttgaatagagcatgcctgaagatatccctgagtgcttggtaagtatgaaatac

SEQ ID NO: 1435 - DNA, 430 bp, Chlorella vulgaris
gtgatccccgtctcgcaatagttccagggcaatcactatgcaggcaaccatgatgaagaccttcggcgccagcctgcgcaaggctgtgcccacccagggcaagggcacccgccaggtgacccgcgcctccgtggagtggtacggccctgacaggggcaagttcctgggccccttctctgagggctccacccccagctacctgaagggcgagttcgccggcgactacggctgggacactgctggtctgtctgccgatccccaaaccttcgctgcctaccactaggttgaggtcatccatgcccgctgggccatgcttggcgccctgagcggcctgacccccgagctgctgcagaactccggcgtggccagcttcggcgacactgctgtgtggttcaaggctggtgcctccatcttcggcgatgatggcctg

SEQ ID NO: 1436 - DNA, 438 bp, Chlorella vulgaris
  unsure (1)..(438): unsure at all n locations
cccacgcgtccgcccacgcgtccgcccacgcgtccgcccacgcgtccggtggaatcccccgtcgacaacaggtccaaggttcacaagatgcagaccctctctgcccgtttcggcgtccgcgcccctgtctcccggggcacccgccaggtgacccgcgcctccgtggagtggtacggccccgaccgcgccaagttcctgggccccttcaccaaccccccttcctacctgaagggtgagttcgctggcgactacggctgggacacctctggcctgtccgccgatcccgagaccttctcccgctacagggaggttgaggtgatccatgcccggtgggccatgcttggcgcccttggctgcgtcgtgcccgagctgctggaccgcaacggcaccgtcaactttggcgagaacgccgtgtggttcaaggccngtgccgccatc

SEQ ID NO: 1437 - DNA, 451 bp, Chlorella vulgaris
caccatggtgaagtacgctaaggaggtggacaacgccaccaaggccgccaaggcccgggggtctgacctccgcgtgcacttcaagaacacgcgcgagtccgccgcagccatccgcggcaagagcctggtgaacgccaaggcgtacctggaggctgtcattgatcacaagcgctgcatcccgttcctgcgctacaatggtggcgtgggccgcaccagccaggctaagaatgagggcaacaagatcggccagggccggtggcccaagaagagctgcgagttcctgctgggcctgctcaaaaatgccgagagcaatgcagaggtgaagggcctggacacggacgccctgtacgtgtctcacatccaggtcaacaaggcgcagaaggggcgccgcaggacctaccgcgcacacggccgcatcaacccctacatgtccagcccctgccacattgag

SEQ ID NO: 1438 - DNA, 409 bp, Chlorella vulgaris
gagacgggcaagatcaaggactttgtcaagtttgacgtgggcaacctgtgcatggtcaccggcggccacaacaacggacgcgtgggcaccgtggtgcacaaggagaagcacaagggcagctttgacattgtgcacgtcaaggacgccgtcggccacacctttgccacccgcatgaccaacgtgtttgtgatcggcaagggcgacaagcccctggtgtcgctgcccaagggcaagggcatcaggcagaccatcctgcaggagcaggcgaagcagtatggcaagacagccactgcttgagagtgctgggcagccagtcagcgggagtagcagcagctgggaggcgagagcggaggcatgggtgcagccggggcctgtggcgaagcgcacatctagaaggcggcagctgggc

SEQ ID NO: 1439 - DNA, 342 bp, Chlorella vulgaris
ctaacgcctatccgaggcttcctcgaagacagaagacatcaacatgtctgacggaggggacagcccgaaggccgccgaggcccccgccgccgccgcggctcccgcccccggcgagcccatggacatcaacaccgccatccagctggtgctcaagaaggcgctggctcacgacggcctcgcacgcggcctgcacgaggcctgcagggccattgagcgcggccaggcgcagctgtgcatcctcgccgacgactgcaaccagcccgactacaagaagctgattgaggccctgtgcgccgagcagagcgtcaacctcattgccgtgcccgaccccaagaccctggg

SEQ ID NO: 1440 - DNA, 428 bp, Chlorella vulgaris
gaacgctgcacgtttgagcttttcagcagtaaagagcgatatctgcatcccatagttggcttgccatggcagcaatgcaggtgttcaagacgagcagtctctctgtgcaactaagcctgacgcggtccttgcaccgtttgcacctactgcctgcgccccagcacagccttggggtcaggctcacagcgcagcgcttggaagctcgcagtgctgcacgactggttgttgcagcggcagagaccgaggctgcgtcagctgcccctgccgctgccgctgagctgccagacgtaagcaaggttgacatccgtgtgggcaagattttgaagtgtgaggcgcaccccgatgccgacagcttgtacgtggagcagattgatgtgggggaggaggaaccccgcaccattgtgagcggacttgtcaaatacgtgccc

SEQ ID NO: 1441 - DNA, 427 bp, Chlorella vulgaris
cggacgcgtggggccgcgcgggccgcagcaggcgcagcagacggagcagcagcagcggccggcctccatcatggtggccgactaccccagccagcagccggcatgggaggacccgcgggcggaggcggacatggcctacatactcaccgtggtcaacaggacccgctcgctgcgcagcgactacgagctcacgcggcagcgcccgccgctcttcctggcctgcaaggatgctgcgcgcgctgagctgctgcgcagcgcgggcatggagctgaccacgcttacgtcatccgagacctccaccgtgctggaggatggccaggcggcgccccagggttgcggcgtggccgttgtggacgacaccacgaccctctacctgctgctcagcggcatcctggatgcggccaaggagattgagaagctgggaaag

SEQ ID NO: 1442 - DNA, 350 bp, Chlorella vulgaris
  unsure (1)..(350): unsure at all n locations
gaaaaagactgggtagctggctgcatggggaatgcatggggtgcctttggaaggtatatcatgatcattagtggatatggctgtactaggtgcaggccctggcatggtggttttattaagggtggcaggcaccgcaatctgccggatagctgggtttggtgtgcaaaggatgctttggcgtgccaccagtcagcaaaaaacagtgattgttgacgtcattagctagcagcactggaacatgtgggctatggaagcgctttcaggacatgtgttgtcgttctgagtttcgcctgtagataagcttgtcgggtaaccagcatacctacaaaaanaaagaagggaggagggag

SEQ ID NO: 1443 - DNA, 399 bp, Chlorella vulgaris
caacccttgaacagctgtccttctttttcgaacgattttcccagggatccatgctgctaccggggtatgtgcccgctcttcttagggttgagggtcttgctttttagcaggggtgccaggtattgctaagagggagtgatagttgagctggactgacagggctggatgaaaaagtgttttgttttgtttttctaaacctccatgctgttgtcaaaaagtgcgcctgcttcttttaccccccggacgaagccgcacagctgttggtgtctggtaaagcatgtttctgctctgatttgctgagagagacgattcccacaagttttgccaagagtacatcagcagcagctgctctgcgctgcatgaccactaaggtggtctgaagctggctctctgttaaca

SEQ ID NO: 1444 - DNA, 445 bp, Chlorella vulgaris
cccacgcgtccgtgcttttcttggaggtgtgacacttgtgactggcctctgggttggctcaacggtcgtctccttgtattacaacaaccggcagcttcaagagcagcagaggatagcggaagccacacggacagatgacaaggagtgagagttcctgggctggcagagggtttgttccatggccttgttagcttcgtcctgtaccttgcaggggtcggtggcttgtgtacttgttaggtgtgccactgccattccatggcagaccttccctcgttgttgggcaaggcgaggccatcagcacttgatgtagttgtaatgtaggccggtgcattgggctgaatgcacgggttgtacgggtatccattctgttttcatgtgtcttgctaggagcagagtcgtgtttcgctgtcatacagtagtccccatgaggtttggtgttgaaaat

SEQ ID NO: 1445 - DNA, 349 bp, Chlorella vulgaris
cgcgtccgcacacgcatccgtgcttttcttggaggtgtgacacttgtcacagggctctgggttggctcaacggtcgtcgccttgtcttacaacaaccggcagcttcacgagcaacaaaggataccggaagccacacggacagattacacagagtgacagttcctgggctggcagagggtttgttccatggccttgttagcttcgtcctgtaccttgcaggggtcggtggcttgtgtacctgttaggtgtgccactgccattccatggcataccttcccccgttgttaggcaacgccacgccatcaccacttgacatagttctaatgtaggccggtgcaattggctgaat

SEQ ID NO: 1446 - DNA, 447 bp, Chlorella vulgaris
ctcagcagcccgctgccctccgctactcctcgaccatctaaccagcagaaatggtgttcgcaaccaaggcagtcgccagcaaggccgtctcaacctggggcaagggcgccttcccgaagcctcccatcgatgtgctgccccttctgaccgctgtgggcgtgggctgcgttgccgctgtgtggtccatgggccgtaacctggcagtcaaccctgaggtctgctgtacaaaggcctaccgtggtggtgacagcctttggaatgatgaggagattcgctccaagtctgaccagttcaggcccttctccttcattctgcgcatgatggccaagcttggcaaggccagcactccctctggcgagtggagccagtgaccgaccgccttgagcagccctgcagcatagcaagcatagcaggcggtggctgagctgagatacccaactgaccgca

SEQ ID NO: 1447 - DNA, 441 bp, Chlorella vulgaris
caagaaccagctcacaggggagtacggcgctgtgcccgacgtggcgcgtgcctacaaggccgctggcaagccatgggtggtcatcggtgacgagaactacggtgagggctcgtcccgcgagcacgctgcgctggagccgcgccacctgggcgcgcgcgccgtggttgtcaagtcgtttgcgcgcatccacgagaccaacctgaagaagcagggcctcctgccactcacctttgccgaccctgctgactacgacaaggtgggtccctttgacaagatcgccatcaagggcctgaccagctttgcgcccggcaagccgctgacgctggagggcacgcggccagacggctcgacctactccttccaggtcaaccacaccttcaaccagaaccagattaactggtttaagcacggctctgccctcaacgcgatgaaagctgccca

SEQ ID NO: 1448 - DNA, 445 bp, Chlorella vulgaris
tgcttcttcagggacgagactggatgttcgctggcgcagtgcagcagaggcttggatcggcataagtgcttgaaggaggttacgagggcttgacagcaccatgtcaggcgaaaagggaactgtcccaggctatcctcccccaggctaccctccgcccatggcttatggcccaccagggaacggatatgaccagtatcccccgccgccatctgggtatccgccgccgccccctccagggtatcctggagcgggtcccccagggtatccccagcagtatggcccgccccccgggtacccaggtgcgcctccccccatgtatggtggtggcggccagcctcagacaatctatgtgcagcagcagcagcccaaccgaccaggcgcagatgactgctgcacagcctgcttagcggcgctgtgctgctgctgcttgttggacatgatcttc

SEQ ID NO: 1449 - DNA, 449 bp, Chlorella vulgaris
  unsure (1)..(449): unsure at all n locations
gcgagagtgaaggcgagtcatcctccggcgagggtgagtcgtcctccagcgagggtgagtcaccttccagcgaggctgaggcaccttcaagcggcgagggtgaggcatcttccagcagcgagggtgagtcgtctccgagcagcgaggctgaggcaccttccagcgagggcgaggctgaggcacctgccagcagtgagagtgagtcatctccaagcgagtccagtgcggacaaggaggaggaggaggagcatgaggccgccggcgagggcgaggcgcacagctcccccagccccagcgagggcgaggcgcacagcccacccagcgagggcgaggccaccaccagcggcggcaagcggcgcctcttgagcgaggccgaggctganggcgcggctggcgggggctgcttccctccctttgagaatgccgaagattttgagaagtatattgat

SEQ ID NO: 1450 - DNA, 451 bp, Chlorella vulgaris
cccacgcgtccgcggacgcgtgggcatctgacttgtcctcgccgccaggaggcctcttcgagccctgcctggctatcccacttaggacaagatgccgcctaagcgtaggagctctcaggaggagaatgtcaccctgggccctgccaccagggagggtgagctggtgtggggtgtgtgccacatcttcgcgtccttcaatgacacctttgtgcacgtgactgacctgtccggcaaggagaccctggtgcgcgtgactggcggcatgaaggtcaaggccgaccgtgacgagtcctccccctacgctgccatgcttgccgcccaggacgtggccgctcgctgcaaggagctgggtgtgaacgctctgcacatcaagctgcgcgccactggcggcaacccgcaccaagaccccgggccaagcgcccagtccgccctgcgtgcgctggcccgctct

SEQ ID NO: 1451 - DNA, 324 bp, Chlorella vulgaris
cccacgcgtccgcccacgcgtccgcacacgcgtctgcggacgcgtgagcaggcgccttggcagtcggccaggatagctaactgtctgaacaaggaccccaagacgtgcggtcatgtcagcacgagaatatcagcctatcggctggcacaagaagaaggtcagttggtgtggtgtgtctggtagatattaccatcattcgattataacggtgtgctagtaacctgcgtatcttggaaaggtaggcatgtgctagttcaagctgacataaaagtcattgcactgcgtcatcattacccttgatacgctgtgatgccttgtgggcaa

SEQ ID NO: 1452 - DNA, 462 bp, Chlorella vulgaris
  unsure (1)..(462): unsure at all n locations
cccacgcgtccacggacgcgtgggcggacgcgtgggcttttcaacagaataggaggcatctccgagaaggtgtatgctgaaggcacacacctcatggtgccctggtttatgcggcccattatctacgatgtgcgtgcacgacccaacgtcatcactagcacttcagggtcaaaggatctgcagatggtcaacattgggctgcgtgtgctgacgcggccgatgtccgagaagctcccagagatctaccggaccctgggcaccgactacgcggagcgggtgctgccgtccatcatccaggagacgctgaacagcgtgatcgcgcagtacaacgcctcgcagctgctcaccatgcgtgaggtggtgtcncgcgacatccgccgcatcctgacccagcgcgcgcgatacttcagcataatgctggacgacgtgtccatcacccagctcaccttctcgcgcgagtac

SEQ ID NO: 1453 - DNA, 450 bp, Chlorella vulgaris
cccacgcgtccgcccacgcgtccgcccacgcgtccgcccacgcgtccgcggacgcgtgggtttcaataccaagcccaagttattcatatttgtaaggtgtttaaaagcacgacgttctcactatttttgtgcgatcaaattacccctgtaacgcggttacactgcagcccccttcacgagcagtgtgcgatacagagcgcaacacgactgacaaagtagcatctctgaggacgctatggccggggcgcttgaggtcctggttgtcggggccaagttgaaacaagtggcgagctggtgagtttggctggcaagcagcaaggaccaaggtttgcagtggacttgacaagaaggaaccggagtggaatgacaagttggcatttgcggcttttacagtggaccttggccaatacccggaactggtggttaggctgaaggagcacaacatggtca

SEQ ID NO: 1454 - DNA, 388 bp, Chlorella vulgaris
  unsure (1)..(388): unsure at all n locations
cccacgcgtccggtggcggcagctacggtggtggtggcgggagctacggtggcggcggctacggtggccagggcggttacggccagcagggtggctacggtggtggcggatacggcggccagggtggctacggccagcagggtggctatgcccagcagggcggctacgggcgctactgagttgtgcccaaacgcccacccccacacatgatgggcctgggccaaggaacactaccgactgcagcggcctccgactgacaagctttactcttgatgataccaacgaatgcatgctggggcgctggtgctgctcgtancaaggcaaaggcgctgttgaatgaatgtctcgcttgctcgctctcttgcccggaggcattgctagtgaggga

SEQ ID NO: 1455 - DNA, 381 bp, Chlorella vulgaris
cggacgcgtgggccgtgcctggggatcgcgctgggcctcgcgtgggccttgcctttcaaacggttggtgtgggcggcgtttctggcggcgtttagggtctcttgcagacccttggtcgttgtgcaggccccagatgtcgctgtatcgaacccagctggcggtgccctgttgcggtgcttctggctcactgtggttctgaggcagcagtggcagggttgccagagtgtgtcttgcacctgtcggtgttgcacgcggggtgcagcacttacgtagctgggacgccaccttgtaagtttgattgttcaaaaaaaagcaaactccaacaacctggctttgacataacataactccctgtacaaaagaaaaaaaaaaggggggccg

SEQ ID NO: 1456 - DNA, 441 bp, Chlorella vulgaris
  unsure (1)..(441): unsure at all n locations
cccacgcgtccgcccacgcgtccgcgacaacaggtccaaggttcacaagatgcagaccctctctgcccgtttcggcgtccgcgcccctgtctcccggggcacccgccaggtgacccgcgcctccgtggagtggtacggccccgaccgcgccaagttcctgggccccttcaccaaccccccttcctacctgaagggtgagttcgctggcgactacggctgggacacctctggcctgtccgccgatcccgagaccttctcccgctacagggaggttgaggtgatccatgcccggtgggccatgcttggcgcccttggctgcgtcgtgcccgagctgctggaccgcaacggcaccgtcaactttggcgagaacgccgtgtggttcaaggccggtgccgccatcttcggcgatgacgggctgaactacctgnggcaaccctccct

SEQ ID NO: 1457 - DNA, 424 bp, Chlorella vulgaris
gcgggcacttggactgcaaccatgccgaagcagattgaggagatcaaggagtttctcctcaccgccaggcgcaaggatgcccggtctgtgaagatcaagaagaccggcgatgtgaccaagttcaaggtccgctgctcacggtacctgtacaccctctgcgtgaccgactccgacaaggcagacaagctcaagcagtcgctgccgcccggcctgcatgtgcaggagatctgagaagtggagtcgttgtagcagtgatgagtagcgcatgcagcagacggccggaggttgcagcgcgcccagctgtcgccacctgtgtgtagcagcctgctgggcggggtgtgcagcaaggccaccgggtaggagcagcagcggtggcttgcggagcgatgctgtaacaaggtgaccactggcactaagggtacga

SEQ ID NO: 1458 - DNA, 444 bp, Chlorella vulgaris
ctcacttgcacattctgctaggcaaagcccgtgcactagtcagccgttcagcaggcttacagcagcaggattacatgcccaccttcaacctgaccaccaatgtgcctggagaccgcgtgtcctccagccagctcattcaggacctttcaaaggcagtggcaaaggcaaccggcaagcctgagcagtatgtcatggtcagcttgaacgcgggcaagccgatgtgctatgctggaacggaggagccttgtgcatttggagaattaatctccattggcgccattggcggcgacaagaacaagaagataagcgcggcccttgcagagatcgtgcagcggcacctgggcgtgccgccttcacgcttttatatcaagttctatgatgttgggaggactgactttggctggaacgcctcaacattctaacgacagcatgcgaagatgtgct

SEQ ID NO: 1459 - DNA, 428 bp, Chlorella vulgaris
gcaaaggtatggttagacacatagttttgatctagggttggtgagcctgtccaatgttcaggaaccagcttcacctggtgtcacttcaaattaaatgctatgaaacgctctcttacaaacgcaggggcaaggaccgtcaccctagcatcagccagtgccatggagaagatcacattcggaaataacctgcctggctatgtgtgtggaagtgtaagcaacccggccgtcatcgtggttcaggagtggtggggcatcactgatctaatcaaggatcaggcgctgaagatttctgagcacggctacaggtgccttgtccctgacttatacaaggggaaaatcggtgtggacaaggaagaggcacaacatctattcgatcacttggattggcctggtgctgtggaggagctgtccaagctgtcaagttcctg

SEQ ID NO: 1460 - DNA, 453 bp, Chlorella vulgaris
  unsure (1)..(453): unsure at all n locations
cccacgcgtccggcccgaggccagcatgacgggcatctgtaagctggctattgagtacatctcccaatttgaccagaacggctcagaccccaagcggaggcgcacctccaccaacgagtagcagccgggtagtttgtcggagttaggcgcaggttgtgtgctgtgcccgccaggctgcccgggagcaagtgagtcgcaccgggctgtaggggacagaggcagtggaacagctgcagaaaagaaagtatggattcgaccgggctttgtgactcaaggtanaggcttggcagcacacagaaaccagcataaggtctgggggttgtttgagggcacaggtgcaacttgtcacaacatcacggtgatggtgctcaagaaagttttggagctggctcgcccgtgctttcttgctactgtcatatggttgctgggtagcaaggcattgctgccatgctt

SEQ ID NO: 1461 - DNA, 466 bp, Chlorella vulgaris
cccacgcgtccggggtaacccatcagcagggattgaaggccaagaacaatggtcaggcacaacaacgtggtgcccaaccagcacttcaggaagaagtggcaggacaaagtcaggacctggttcaaccagcccgctcgcaagctccggaggaggaatgcccgcgccgagaaggccaagaaggtgttcccccgccccaccgcgggcgcgctgaggcccatcgtgcacggccagaccgtcaagtataacatgaagaagcgcgcgggccgcggcttcacgctggaggagctcaaggaggctggcattccctccaagcttgcccccaccattggcattgcagtggaccaccgccgcaagaacaggtcccttgaggggcttcaggagaatgtgaaccgcctgaaggcctacaaggccaacctggtggtgttcccgcgccgcgccggcaagcccaaggccggcgatgccagcg

SEQ ID NO: 1462 - DNA, 192 bp, Chlorella vulgaris
cggacgcgtgggcggacgcgtgggcggacgcgtgggttccggcgctgccgccgcgcggcgacctgagcctggacgacatccgacacgcacgctacttcttcagctgaccgccgcactacgtcagctgaccatgctgccaccgcttcagctgaccatgccgccacttcgtcagctgagagcagtgccagcccg

SEQ ID NO: 1463 - DNA, 460 bp, Chlorella vulgaris
cccacgcgtccggcagcacttcgcaataaggactgattcctgggtccttgttcttcaaggagccccgtaccttctttgcttcattctcagtagaacatccgatccctttccatggccgcggggccttcctccggggggggcggagggctcactgctggcaatgatctgcgacgaggacactgccaccggcctcttacttactggtgtgggccacgtggactacaaaaagcaaagcaacttcttagttgtggacgagaaaaccccacaggcaaggatagaggaggctttcaaggagtttacaacccgggaagacatcgctgtgctgcttatcaaccagtatgtggcaaacatgattcggcacctgttagacaactacaccaagccgatgcctgccattctggagatccccagcaaggagcacccctacgaccccagccaggactcaatcctggcgagggtg

SEQ ID NO: 1464 - DNA, 422 bp, Chlorella vulgaris
ctggtgtacaagcgcatcaccagcctggcagggcacacggcacgcgtgggggagctgattgaacaggtggagcggctgagcggcgacaacgcggacgaggtgcgcaagcagctgtacctgcgcaacgtctcctcgcaccacgagctggcgccggaggggctggagccgatgccgcagccgcggcgggtggagggggatgtggtggagtttaacagggtgttcctcagctcgcccgacggcagccggctggtgagcgagctgtcgttcagcgtggagccggggcggtcggtgatgatcatggggcccaacggctccggcaagagctcgctcttccgcgtggcggcgggcctgtggccgttgcaggctggggagatcacgctgccgcccaagggcgagctgttctaaactgtccagcgggccta

SEQ ID NO: 1465 - DNA, 451 bp, Chlorella vulgaris
agtttttggagcctatggttcccctcacgcgagtacaaaatatgcatggtgggactggacaacgctgggaagaccacgattctgtacaagctccacttgaaagagacggtgaagacacaaccaacgatcggctcgaacgttgagcagatcaagtttgaaaacctaaccttcgaggtatgggaccttggcggccaggcaagcctgcgcccctcctggagcacctactaccccaacacggacgcagtgattgtggtggtagacagcacagaccgcgcgcgggtgggcatctgcaagcaggagctgtttgggctgctggggcatgagcaccttaacaaggcagtggtgctcatctttgccaacaagcaggacaagagggacgccatgaccgtggcggagctcccggaggcgctagaactggtcagtatcaagggcaacaactggcatatacaga

SEQ ID NO: 1466 - DNA, 449 bp, Chlorella vulgaris
cccacgcgtccgagccggtgggaagggcttgtcttccgcaagccaaaatgccgtccataggcttttaccgcaactatggcaagaccttcaagaagccccggcgccccttcgagaaggagcggctggatgccgagctgaagaccgtgggcgagtacggcctgcgcaacaagcgcgagctctggcgtgtgcagatggtgctgtccaagctgcgctccagggcccggtccctgctgaccctggacgagaaggaccccaagcgcctttttgagggtgaggccctcatgcgccgcatgtaccgctacggcttcctggacgagacccagaacaagctcgattacgtgctggcgctcaaccctaccgacgtgctggagcgccgcctgcagaccctggtgttcaagctgggccttgccaagagcatccaacacgcgcgcgtgctcatcggccagcgc

SEQ ID NO: 1467 - DNA, 442 bp, Chlorella vulgaris
cccacgcgtccgaggtgatccatgcccggtgggccatgcttggcgcccttggctgcgtcgtgcccgagctgctggaccgcaacggcaccgtcaactttggcgagaacgccgtgtggttcaaggccggtgccgccatcttcggcgatgacgggctgaactacctgggcaacccctccctcatccacgcacagtccatcgtggccgtgctgctctcccagattgtgctcatgggcctggttgagggctaccgcgtgaacggcggccccgctggcgagggccttgacgccctgtaccccggcgaggcctttgaccccctgggcctggccgacgaccccgacagcttcgctgagctcaaggtcaaggagatcaagaacggccgcctggccatggtgtccatgcttggctttggcgtgcagggcctgctcaccggcaagggccccct

SEQ ID NO: 1468 - DNA, 404 bp, Chlorella vulgaris
cccacgcgtccgattgaatgtcgcctgcactgtccgatatggcctctgccctgctcgctacccctcttgtggtcaaggccactgttatgtctaccggtgttgcaatgcgtcaggctgtcgtggtgaaggcccaccagcaggaaatcatgagggcagttctgggcctggttgcagcatctgtgctgggtttggaccttgtcgcccaagcggatgctaaccagactgcgcttatgaatggctttgtggccacagtaaagggttatatcatggaacgcagcatcaaccacggtatctcccccaagatgaaccacgagattctcgataagctcaaggcttaggccaacaactaaatgaccatcggctactgaatgccttacagcactactatgactgctgctatggga

SEQ ID NO: 1469 - DNA, 462 bp, Chlorella vulgaris
cccacgcgtccggctgttttggagacccgtgcataagacctgccgccatgggtcgtatgcactccaagggcaagggcaagagccgctcggctctgccctacaagcggagcccgccctcttggctcaagatttccagccaggaggtgaacgagctcattggcaagtttgccaagaagggcctgaccccctcccagatcggtgtgctgctgcgtgacagccacggcgtggcccaggtcaagtctgtgaccggcagcaagatcctccgcatccttaagggccacggtttggctcctgagatccccgaggatctgtaccatctgatcaagaaggccgtgtccatgcgcaagcacttggaggccaaccgcaaggacaaggacgccaagttccacctgattctggtggagtcccgcatccaccgcctgggccgctactacaagaagaccaagaagctgccgcccaact

SEQ ID NO: 1470 - DNA, 311 bp, Chlorella vulgaris
  unsure (1)..(311): unsure at all n locations
gcggcttcaaaagaggcttgcagcctccgtcctgggctgcggcctcaggaaggtgtggctggaccccaatgaggtcaatgacatctctatggccaactcgaggcagaatgtgcggaagctagtgaaggatggcttcatcatccgcaagccagagaagatccactcccgtgcccgcgcccgggcgtcagcggaggccaaggctaagggcangcacaccggctacggtaagcgccgcggtacccgcgaggcgcgcctgcccaacaaaatcctctggatccgccgcatgcgcgtgctgcgccgcctgctcaaga

SEQ ID NO: 1471 - DNA, 458 bp, Chlorella vulgaris
  unsure (1)..(458): unsure at all n locations
aggggcaggatcgactctgtcctcatggagcatgtgctgatgctgcccaacgtcaacctggctgaccttgccaacagccccacccccaccgccctctccatgatccacgatggcgactatgacgtgactgtctccaacgatctgtccaccgtgagcagccccgccaaccaggccaacattgtggacactatcaccctctgtggcatgaccggctttatcatcgacggggtgctgctgcccgccacagatattgcctctgtgcccgtgacaactcacgaccagattgaggccctgtttgctgccgctggcaactccaccatggcttaaatcggagagctgggaactggtgctgcggctgtcgcttgtctccccgatggacgacgctcgctccaggtggtgtanggaacagtttgaggcgtctcctcaaacccactgctgaatcttttcctcaaccttgc

SEQ ID NO: 1472 - DNA, 463 bp, Chlorella vulgaris
  unsure (1)..(463): unsure at all n locations
cccacgcgtccgcccacgcgtccgcggacgcgtgggcaggtggggaaggacggcacccctttacttgggcatggcagcaattgcgactctgcactccgaggtggcccccgtcaagcagagggactgaacccctcctttccttgcctgtgatgggggagccgcaggagcggaggaggggggtgtgcaaatggtttaacgcccagaaaggctttggcttcattacacttgaagatactgatcaggaggtttttgtccaccagagcaacatagataccactggctataggagcttacaacaaggggaggaggtcgagtttgacctgntggtgggtgaggacggcaagcgcaaagcctttcatgtgacgggccccaacggcgccccgccgcagggcagcttgaactaccgcggtggcggccgtgggtacagcagccgaggtggccgtgaaggctacccgcccgccag

SEQ ID NO: 1473 - DNA, 427 bp, Chlorella vulgaris
gctgtacatcctgatgcgcctgctgggtggtgccaagaagcgcaagaagaagacctacaccaagcccaagaagcagaagcacaagcacaagaagatcaagctcagggtgctcaagttctacaaggtagacgacagcggcaaggtgcagcgcctgcgcaaggtttgcccccagtgcggccccggcatcttcatggccacgcacttcaaccgcgtgtactgcggcaagtgccacctcacctacgtctatgacaaggagggagccaaggcataagcagcttgcgctcactgccctggcgggctgtggtgccgccagggaaactcttcgtctagtagggcgtgccctaaccagcagcctagtggacggagagccagcccgtggtatgcagcctggcagctcctcgtgcgtcctgcttctctggactgactc

SEQ ID NO: 1474 - DNA, 416 bp, Chlorella vulgaris
cagacgcgtgggccagcatgctcaagctgaacgtgcgggaagcgagggaggccctgcgccagcatttgcagcagctcagcccagcggcacttgggactaatgacccgcctgcaagggctgccatcaatgaggctgagcaactgctggtggaggtggcggctattctgtgaagaagcaacgggtacccacgatagaaggatcacctggatggcctgtctgggcacgcatagccaagcatgaatgcctgtcacagaacgcatatgtggtggttttagacccccagcggatgctgctaggtatgcctgtaagatgtctgtccacttcgagctgatgcggcatgggggtacatttgtcatcgcctgtcaagcccatccttaagcaggtgctgcctgcgtattgcgcttgtgttgggctgc

SEQ ID NO: 1475 - DNA, 447 bp, Chlorella vulgaris
cgaacttttctgagcacctgcccctgtgaaccgcgttaggtcgattgcgtcatgagttcagctaaacagctggtggatgagacgatcaagggcaaccgtgtggtggtgtggtcaaagagttactgcccctactgccacaaggccaagcgtgcactgaaacgctacttaaaggatagccaagtcgtggtggttgagcttgatgagcgtaatgatggcagccagatccagcaggcgctgggccagataactggtggcacctctgtaccccgggtcttcattgacggcgagttcatcggaggaggggatgataccgagaggttggcaaacaatggcaagctagaagtgctgctgaaggacaagggcatcctttgaagccagcaacgctaacatccgtgtgtctgggcacgctatgcgttcgaacagcagagctcagctgtgtccctgatg

SEQ ID NO: 1476 - DNA, 445 bp, Chlorella vulgaris
gccgcctgcaggatattgccaagcccggcagcgtggacaaggcccccttcttcggccacgagctgaagggcgcaggcctgggctaccccggctttgaccccctgggctacatgaacaccacccccgagaagcagaacgagtggaagctcaaggagatcaagaacgggcgcctggccatgctggcctttgccggctttgtggcgcagcacatcaccaccggcaccacccccctgacgaaccttgccgaccaccttgccgacccctgggcaaccaccgtgctctccaacgagcacgcccgcctgctctgagcgctgcgcccgctgcttgccggcttgtaggctgagctgctactttgtgtgccttggaggctgcggctgccctcgaggcagtggagcagcagcagtaggcagctgacatttgagcatggccgctgctcgctcccctg

SEQ ID NO: 1477 - DNA, 369 bp, Chlorella vulgaris
  unsure (1)..(369): unsure at all n locations
cccacgcgtccggcgatcgggtgacaccatgcaagcgctaaccgtctccagctttttctcaaccacccgtcctaaggtcgtggggaggcccagccagcgtgcagtattgcgcatctcgtgcagcgctgtggaaggaaactcctccacgtctcggcgggaactagtactgcacagcgtgaacgtggctgtcgtgggggccctcttgggtttgggggcaggcccccggccaaagaacctgggggtgcaagattatggcggcggtgtccagtcacttagcctctgcccaccgacaccaaattgcatatccacggctgaggaaataaacgaccctggtcactatgtcnctgcctggacatacaaccctgccca

SEQ ID NO: 1478 - DNA, 446 bp, Chlorella vulgaris
gattaagatgtctcccagcttcctttggcacagcagcaaagcttgtttcggcagagctgtgagggcatgcgaggtgcggacagatgtgaactcaactataaaataggtcttgagcagatggaggccagctttgttgaaacgagcttgaaggtcccccccgtctgggcacccacttctttacaaattgcttgccttctgttgccaacattgtttccctcgcatttgctgctttgggcttatctttggatctaacacgggcccggcaggtcccaagagtgaaagttgacagtggtttgctgcctgcctgtcaaagtgtgccactagatggcgcgttgctttggtcctcgcttgcttgcctggtgtgtatgcattgcctgtggaagctattggtgctaagccttgctggctacccaggtccttcaaggttctgaagttcaagtgacttg

SEQ ID NO: 1479 - DNA, 431 bp, Chlorella vulgaris
  unsure (1)..(431): unsure at all n locations
ggtgcttgggatagctgcaggggtgtcaagcaggcatccgcaccatgcctttcaagaggtacgtggagattggccgtgtggccatgattaactacggccctgagtacggcaagctggtggtcatctcagacgtggtcgaccagaacagggccctgattgaccggcccgacgagacccgccgtgtggagaacttcaagcgccttgcaatcactgacttcaaggtggagattccccgcctggccaagaagtccgtgctgaagaaggccctggaggaggctgatgtgttcaacaagtttgctgctagcgcctggggccagaagctggccaagcgtgccgccaaggccgaccagactgactttgaccgctacaaggccatggtccagaagatcaagcgcagcgcacaggttangaaagctttcaaccagctgaag

SEQ ID NO: 1480 - DNA, 464 bp, Chlorella vulgaris
cccacgcgtccgcccacgcgtccgcccacgcgtccgatcaacgtcccggtgttttcccagtacttgacgctggcattcataggcttcatcagtgtcacctctctgagaggcttcatgaagcacatgcagcgcttcttcagcgccctgggcggggccggcaacgccaccacggtggtactgctccttacggagcttcttggcttctacacaatctccaccatgctgctgctgcgccggcagctgcccctcaagtaccgccagatcatcaccgacgcgatcggcggcgacctggagtttgacttgttccaccggtgcttcaactcggtgttcctggtgtcggcgctgctgagcctgctgctgttctactcccagtttaagcgcacgcagctggaagccagcgaccggctgcctgtctacatcacgccgcaccccaaggaatgacgggccctctctgctgaccgcat

SEQ ID NO: 1481 - DNA, 452 bp, Chlorella vulgaris
atgaaagtatatcatgcatcaagtcaaaaacctgaaagtttaaaaataggtgtgttagtaaataaaatgagaaatttaagaaaaactacagcccttataactccagtatatgagaaacaacagaatccaactgtatcaacaaaaacaacaaaaaaaacttcaataactcaagaaaataataaaaaatcgaaaaaaaataaaaagtaaaaaaaaaaaataacaaaaaattttttttgtaattctgttacaataaaaaaactttatggaacttcttttattataaataaatttagctttttttgtagacacttggtatataaaaaaagccaaaagctaaataaaccgctattttttttacagattatcatcttttttacattgtattttatcttttttataatataaaaaagataaaattcaaaagttaagttaaaaaactaaaaaaaatatag

SEQ ID NO: 1482 - DNA, 401 bp, Chlorella vulgaris
cccacgcgtccggggcccgcctgtacagccagacacgatgacaaagaagaggaggaactcgggtcgcaacaagcacggccgtggccatgtgacccgcgtgcgctgcgaatcctctggcgtgctggtccctaaggacaaggccatcaagcgcttcattgtcaggaacatcgtggatgcctccgccatccgtgatatccaggacgcttgtgctattgatgggtatgcgctgcccaagctgtaccgcaaggtgtattactgcatcagcgcggctatccactccaagattgtgcgcgtgcgcagccgcaagaacaggcgcaacagggagccgcctgcacgccctggtttcgggccccgccgtgagggccagcagggcgggcagcaaggccagcaagggggggggc

SEQ ID NO: 1483 - DNA, 437 bp, Chlorella vulgaris
tcccaggtacacgtacgcggccgcgtggggccaagcgcgcatcatcctggggtcagcatcaacctccaggaaaggcatcatggatgaggttgccaaggagtacggcttcacctatgaggtctgcacggccgacattgacgagaaggccatcagggagcccgacccgaagcacttggttatacgactggctcatgctaaggcagaggcaattagggcgaagctactcctggcaggcacaatcactgggctgctcctgacgtgtgaccaggttgtggtgcatgaggggcggattcttgagaagccccatgacgcagcggaggctcggcagttcatagacggctacggccgctctcccgcccagactgttggctccgtagtggtcaccgacctggacaacgggctcagctatgagggggtggatgtcgccactatccact

SEQ ID NO: 1484 - DNA, 437 bp, Chlorella vulgaris
gcatcgcgttagcagccgacagccgcacaatatggcggagtcggtgcagaccttcgggcgcaagaagaatgcagtggctgtggcctactgcaagcgtggaaagggggagctgaggctcaatggctcccctctggaccttatccagcctgacaccatgcgctacaaggtgctggagcctgtgctgctcctgggcaagcagcggtttgccaacgtggacatccgcatccgcgtcaagggcggcggccatgtgtctcagatctacgccatccgccaggccatcgccaaggcgctagtggccttctaccagaagtacgtggatgagcagagcaagaacgagatcaaggacatcctgctgcagtacgacaggacactgctggtcgccgatcctcgccgctctgagcccaagaagtttggcggtcatggtgcccgcgctcgct

SEQ ID NO: 1485 - DNA, 448 bp, Chlorella vulgaris
  unsure (1)..(448): unsure at all n locations
gcggcatcgagttcggcgaggctgtgtggttcaaggctggcgctcagatcttctctgacgacggcctgaactacctgggcaaccctgccctcatccacgcccagtccatcattgccaccctcatcacccaggtggtgctgatgggcgccgttgagggctaccgcaccaacggcggcggctgggagtgggccgagggcctggacaacctgtaccccggcggcgactactttgaccccctgggcctggccgacgaccccgaggccctggccgagctcaaggtcaaggagatcaagaacggccgcctggccatggtctccatgctgggcttcttcgtgcaggccatcgtcaccggcaagggcccacttgagaacctgctggaccacctgnaggagcccggcaacaacctgtgggccctgtccgccacctggccaactaagcggcccgccag

SEQ ID NO: 1486 - DNA, 360 bp, Chlorella vulgaris
gcaaaatggcgagcaaggtgtccggcgaggtgctgcgtgagggtaacgctggggtgctggagggctccaagtccaaggcccgcaagttcacggagaccgtggagctccagattggcctgaagaattatgacccccagaaggacaagcgtttcagcggctctgtgaagctgccttactgcccccgtccccacctgaaggtgtgcgtgctgggtgaccacaagcactgcgaggaggcccagaacgcgggcattgacgcgatgagcgtggatgacctcaagaagctgaacaataacaagaagctggtcaagaagctggccaagcagtatgccgccttcctgtcctctgacagcgtgatcaagc

SEQ ID NO: 1487 - DNA, 442 bp, Chlorella vulgaris
cccacgcgtccgtgaagaagcagtaccagctggtcaagacacgcacgtccaacaactacacgtatgtgatgggctcgcacgtcatgcgcttcggcacgctggacattgatgaagagccggctgccaacttccttggagaagacaacactggtgacggcagcctggcaggcaacgatgctgctgcctggactccgctggaggctgtgcctcaaaggggtgccgacctgctgcacctctacaccaagtataccagggcaaccggcgccgacaagtctgctgctttgcgcgctttggatgctgaggttgcaaagcgtgcggcgctggaccgcagcatgcatgccgcagtgagcgcgctggtgcggaaggcaacgctgacgagctcagtacagacgaagtatggggagggtctgctgggcgctggcgcatccaacgctgcattggt

SEQ ID NO: 1488 - DNA, 395 bp, Chlorella vulgaris
aggcatattctctatctgttcgatcgttgtttgatcattcgaagcaaaccatggtttgcccaatatgcattgccacagccatagccgccaacgcacccaccattgctgctgtggctggtggggctgcagcagccaaagcggcgaagctggcatatgataagtcacatccatcgagagccggggaggatggtggggttaggttcggaaggcccaagctagccaagctagtggcgcagacggtagagaccatcagtgcgaagaagtcgccatgaggtccgaggtagacagccgttagcagaagcagagcgtggtgcgggccgttttaccagcggaaacgagggagtacgaagtgcaaaatgaatacaagagctcaccgagcatgtacattatgaatg

SEQ ID NO: 1489 - DNA, 461 bp, Chlorella vulgaris
cccacgcgtccgcggacgcgtgggcggacgcgtgggctaccgccagattgaggtcatccatgcccgctgggccatgcttggcgccctgggctgcatcttgcccgaggtcctgcagaggtacagcggcatcgagttcggcgaggctgtgtggttcaaggctggcgctcagatcttctctgacgacggcctgaactacctgggcaaccctgccctcatccacgcccagtccatcattgccaccctcatcacccaggtggtgctgatgggcgccgttgagggctaccgcaccaacggcggcggctgggagtgggccgagggcctggacaacctgtaccccggcggcgactactttgaccccctgggcctggccgacgaccccgaggccctggccgagctcaaggtcaaggagatcaagaacggccgcctggccatggtctccatgctgggcttcttcgtgcagg

SEQ ID NO: 1490 - DNA, 457 bp, Chlorella vulgaris
gttgctggcgtcggagcggctggcaacatggcgaccgagattaagttgttcggcaagtggagcttcgatgaggtggaggtgaacgacatctcccttgaggactacattgccgtgaagcccaagtatgcgcgcttcaccccccactctgccggccgtttccagaagcgccgcttcaggaaggcgcagtgccccattgtcgagaggctgaccaactctctgatgatgcacgggcgcaacaacggcaagaagctgatggcggtacgcatcgtcaagcacacctttgacatcatcaacctgctcaccgaccagaaccccatccaggtcctggtggacgccatcatcaacggtggtccgcgtgaggatgccacccgcattggctccgccggtgtggtgcgccgccaggctgttgatgtgtcgccgctgcggcgcgtgaaccaggccatctggttgctcacca

SEQ ID NO: 1491 - DNA, 412 bp, Chlorella vulgaris
gcagcgcatttgctgcaggcttgcaggcacagcacgtcaaatctcttgtcagtcatccgctttaaccagtccacgggcgcttgggctggctcacgtgcagttccacgggaaccaagcagctaatatgagttcgagcgcagagtcggaggtagtcgatgaacaacatgaaactgttggcgtcgcaatgctcaaacggcctaaaggcctgaactcgcttagcaccaacatggtggaacggttgtttgacttatataacagatggaaaacttccccggatgtgtcgtgcattttgctaaacggctcaggaaagaaggcattcagctccggatgggacgtgaagacgatcgtggacctggtgcaggcggagacgtttgaacacgctctgcggtttttcaacaccgagtagcgcctg

SEQ ID NO: 1492 - DNA, 407 bp, Chlorella vulgaris
  unsure (1)..(407): unsure at all n locations
aggcaggggggctgccacaatgaaacagctagtctcttcccgcaccatcgacatcccttcgggggtggagattgaagtcaaggcgcgtaaggtccgcgtcaagggccctcgtggcaccctgacccgcgacttcaagcacctggcggtggacatgttcctgtccgaggaggagggcgtgaagaagcttaacgtggactgccactttggcaagcgcaaaagcctggcagctatccgcacagccacctcccacgtgcagaacctgatcactggcgtgaccaagggctacgagtacaagatgcgcctggtgtatgcccatttccccatcaacatcaacatcgaggatggaggcaaggtcatcgagatccgcaacttcctgngagagaagcgcgtgcgcattgtcaagatgc

SEQ ID NO: 1493 - DNA, 390 bp, Chlorella vulgaris
gtggaatcccccgtcgacaacaggtccaaggttcacaagatgcagaccctctctgcccgtttcggcgtccgcgcccctgtctcccggggcacccgccaggtgacccgcgcctccgtggagtggtacggccccgagcgcgccaagttcctgggccccttcaccaaccccccttcctacctgaagggtgagttcgctggcgactacggctgggacacctctggcctgtccgccgatcccgagaccttctcccgctacagggaggttgaggtgatccatgcccggtgggccatgcttggcgcccttggctgcgtcgtgcccgagctgctggaccgcaacggcaccgtcaactttggcgagaacgccgtgtggttcaaggccggtgccgccatc

SEQ ID NO: 1494 - DNA, 395 bp, Chlorella vulgaris
cccacgcgtccgcccacgcgtccgcccacgcgtccgcccacgcgtccgtggaatcccccgtcgacaacaggtccaaggttcacaagatgcagaccctctctgcccgtttcggcgtccgcgcccctgtctcccggggcacccgccaggtgacccgcgcctccgtggagtggtacggccccgaccgcgccaagttcctgggccccttcaccaaccccccttcctacctgaagggtgagttcgctggcgactacggctgggacacctctggcctgtccgccgatcccgagaccttctcccgctacagggaggttgaggtgatccatgcccggtgggccatgcttggcgcccttggctgcgtcgtgcccgagctgctggaccgcaacggcaccgtcaac

SEQ ID NO: 1495 - DNA, 377 bp, Chlorella vulgaris
agcccacgcgtccggaaggccattgccctcgaagtcgacgacgcagtccctggccacaaccctaaagtcaccttcaggagatcgtttcccttgagggacaggaacgtgggcatcaattacacccacaatattgcggccaagggctcaaatgtggaggccatcgtgcccatcgacgacgacaacaaggccaccattatcgacaacctcaacgactactaacggcccggatcacaggaacctgatcctcaaatgggcccacacccagatggacttcacttttgaacctgccttcaacctgaacactgagagcgtacaggccaaggtgacgtaccaggtcgacccatagaacaagctcacggccaactttgagacccaca

SEQ ID NO: 1496 - DNA, 400 bp, Chlorella vulgaris
ctcacaccgcagcctcacaagcagccatggccggcaaggaggttatccgtgcggcccagatgtttacaaagacgggccaggccagcaaggtcagcgtggtgaaggagattgttattggcacggtcctgggcactgcgctgggcatgtggtggcagacgtggcattggtcagagaacaagaagtgggaagatcattacaaggcgcttgcggcccagaagtgagggacttgttggctgctggttagagcgcctgtctctgcaaggtctgcttacggtggagcggcatggaatgttcagggtcagcttgggagtctgggctagaaagaggtggatagaggccgcagctgcagaggggcgccccaaccgccagctagagcgtacatatggtaccttactttgtg

SEQ ID NO: 1497 - DNA, 456 bp, Chlorella vulgaris
cggacgcgtgggcggacgcgtgggcgctcaaggcgaagcaggccgaagcagccaaagcggagcgcatgctgagcgacacggtgggccctgaggagatcgcacaggtggtgtccaaatggacgggggtgccggtgtccaagctgcaggagacggacagggagcggctcacacacctggaggacttcctacacgagcgagtggtgggccaagataccgcggtgaaggcggtggcggatgccgtgctgcgggcgcgggcaggactggggtcacggaatcggggcgccagcttcctgttccttgggcccactggtgtaggcaagactgagctggccaaggcgctggccagcatgctgtttgactccgagaagatgatggtgcgcatcgacatgagcgagtacatggagaagcactcggtcagcaggctcattggcgcgccgccgggctacatcggccacg

SEQ ID NO: 1498 - DNA, 451 bp, Chlorella vulgaris
ggatttcgcatccaaccctgactgatggaagggcggcggcgctgtgaatgtcggcgcgctggcacttcccaagcctggcggtcactgtactgatggcagcaggaggctaggtgctgctctggcgctggcggttgcgagctttccgctcttgtttattctgccaagtttcagctttcaagaagtaataaataaccgcaatgctcttccttacctacctcaagattgtctgctctttcattggcatgcctgccttgaactgctgcttgaacttgcttgttatggctcttgcgtttgtgtcccctgccaggtgcttccctgaccaccagtcaggcctaccgcttgtgccttgttgttgacacaccctcagtgacaaacttgctggcagtttgaccataggagtatgcacatgcgtcgtgtttttttaaacttcatgcagaatggccttcttgcg

SEQ ID NO: 1499 - DNA, 461 bp, Chlorella vulgaris
cccacgcgtccgcccacgcgtccgggaaatcatgtagcaggatagggtgaacagcgcagaagaggtattaacctgcaccgaggcgcataaagatggcaccatggactcagtcagcgcctccagggtggctgaatcagacaaacccggtgcaaagacgcgcagagggacgcagccaggcttgttgagcggtgacgatagcgcgtgcgtggccaccaaggagagggtgccaatatgcttagacgcatattcatgcaccacttccaaagcagcattggcatgactcaggacgacaaccacgccagtcttgtcaaggctgtggagcacatggctcagccgggcttctcagcagcagatgtggacaacgcaaataagtatgcctttgttaagccgccagcgggtgataccagcctagccataatcccgcccgagggtctcaaaatcccggtccacatatcccggga

SEQ ID NO: 1500 - DNA, 331 bp, Chlorella vulgaris
  unsure (1)..(331): unsure at all n locations
gtggcgctgagggagggcctggcacgcatggtggatgacttccggcacatgctgcagatagatggcggcgcgggggcgcatgcgccgcccggcagcaacggcaagctggctgcggccccggccgcggcagccaagaacggcatcaatgcgtgagggcgctggctacctggcagtggaaagttccatgggatgggagccgcgagcttggttgcggacgggaggtgatacggttggggtgcctcgtangctgggatggcccgctgcgggcagtggctagttctgcccggttgcttggagtctccagctgagcatgggcatggtgagtgcacag

SEQ ID NO: 1501 - DNA, 359 bp, Chlorella vulgaris
agcccacgcgtccgcacacgcgtccggttcggtctgcctgtttgtggggttcccccttaaagtttgcattcacgcaccaaccaaaaatgtccaagtctgagcttgcctgcgtatacgccgccctgatcctggcggataacggtgccgatgtcaacgccgacaacatcaccgcaatcgtgaatgctgctggtgtggatgttgaaccctactggcccggcctgtttgccaagctggccgataagaagcgcatcgaggacttcatcgtgaaccattgccccggtggccgcgctgcccctgctgcgggcggtgctgcacctgctgccggctgtaccgctgatgccgcccccgccgccaaggat

SEQ ID NO: 1502 - DNA, 402 bp, Chlorella vulgaris
agcattcacgcaccaaccaaaaatgtgcaagtctgagcttgcctgcgtatacgccgccctgatcctgacggatgagggtgccgatgtcagcgccgacaacatcaccgcaatcgtgaacgctgcgggtgtggatgttgaaccctactggcccggcctgtttgccaagctggccgagaagaagcgcatcgaggacttcatcgtgaacgttggcgccggtggcggcgctgcccctgctgcgggcggtgctgcacctgctgccggcggtgccgctgatgccgcccccgccgccaaggacgaggacaaggttgaggacgacgacgacgaggacatgggcttctccctgttcgactaagcgcctggcgctttgggtgtctgcaccgctgcaaaccagcatgcttccct

SEQ ID NO: 1503 - DNA, 391 bp, Chlorella vulgaris
gtgcttgccacctgcagacaccacccagcaacgatggcctccaccatgacctgcaccgccctgcgcgcctcggttgccaggagggctgccccggcccgccgcggtgccgtgaaggtccaggccgcggccaagcagatcccccactggctgcccggcaccccccgcaaggactacctggatgccgctgacctgccaggcaacttctcctttgaccccctcaacctggccaccaaccccactgcgctcacctggttccaacaggcggagctgcagaacgggcgctgggccatgctgggtgttgccggcatgctgaccccggagctgggtgccaagctgggcggcttcaccggccccgccggcagggtgccatggtatgatgtgtccaactacg

SEQ ID NO: 1504 - DNA, 400 bp, Chlorella vulgaris
cccacgcgtccgcccacgcgtccgctgaggcaagccgggaatcgagttggccttgagccgacgcgtttgacgcccgcagcagcacctaacacacgcaccaggcaccatgctcatctccaagaagaacaggcgtgaggtgtacaagttcctcttcaaggagggtgtgctgtacgcggagaaggacttcaacctgccggagcaccccgagattgagggggtgtccaacctggaggtcatcaagctgatgcagtccatgaagagcaaggacttggtcagcgagcgctatgcctggcgccactactactggttcctgacggacgcgggcatcgagcacctgcgtgagtacctgaacttgcccagcgagattgtgcccgccacactgaagaaatcgaccaggcct

SEQ ID NO: 1505 - DNA, 401 bp, Chlorella vulgaris
cccacgcgtccggcaacttcaagtagctatcatggcctccctgaccgcctccacaaagcttgtggccgcccgccgggtgtcccttcgcacacaggccaaagctcctcgtcctatgcgcgcaacccgcctagtgtgcagggcagcaagggacgcttctgagaccctggagaaggtcaccaagatcatcgctagccagctcggcactgacgccgataaggtgaagccagagtctgactttgcgagcctgggcgccgactccctcgacgttgtggagattatcatgggcctagaggaggagtttggcattgagatcgaccaggaggatgctgccaagctcaaggacgtgcaggcagtcgctagctatattgtggagaagtagacattcgcagcaggttcgttga

SEQ ID NO: 1506 - DNA, 400 bp, Chlorella vulgaris
ccgctgagaaccgttccgagtacgtgcggctgtatactaagtggctactggacacctccatcgccgcccagttcaaggcctttgaccggggattcaccaaggtgtgcggtgggccagccctgagcctgttccgcggggaggagctggaactgctggtgtgtggcctaccacacctggactttgaggagctggaaaaggcggcgagctatgaggggggctacaccaagagcagcgatgctgtcagatggttctgggagatcctgcgggccatgcctctggagcagaagcggcagttcctcttctttaccactggcagtgacaggtcacctgtgggtggtttgggtacacgtaagctgctggttcagaggtctgggccggacacagatcggctgctcaccgc

SEQ ID NO: 1507 - DNA, 418 bp, Chlorella vulgaris
gtacttctgcaccttctgcggcaagttctccatgaagcgccaggctgtcggcatttggcagtgcaaggcctgcaagaagacccttgctggtggcgcctacgtgtgcaacaccgccgccgccgtgactgtccgctccaccatccgccgtctccgcgagcagattgagaagtaagcagccaaacccagaaaggcagccgctacatcagcagcagcccaaccactagcccagcgtgcaggcgccgtggatgccagtattttggggcgccgaccatgacagccttgggacagcttgtgctttggcctgtgagctgtggaaggcaacagggggcggtcagccgcgggctgtgatgctgccagcagacgtgtaactcatgacgagcgctgtcaggaggagtggagtagtgtaaaagcagttggc

SEQ ID NO: 1508 - DNA, 463 bp, Chlorella vulgaris
cccacgcgtccgagcgtcaccagagcgaccgtaagatctccgtcaaggagagctggaggcgccccaagggtattgactcgcgggtgcgcaggaagttcaagggatgcggcgtgaatatgcctaacatcggctatggcaccaacaagaagaccaggcacctcctgcccaacggcttctacaagtttgttgtgagcaacgtgaaggacctggagctgctgatgatgcacaaccgcaagtactgcgccgagatcgcgcacaacgtgtccaccctcaagcgcaaggcgattgtggagcgcgccggggagctgaatgtcaagctcaccaatgccggcagcaggctgcgtagccaggaggacgagtagccgcctgggcctcagcagcagcggcggtagcagcaacggcggcagtgccagcgtatcagccattgcgttggcacagctgctcgatagatgtaatccaaccc

SEQ ID NO: 1509 - DNA, 410 bp, Chlorella vulgaris
  unsure (1)..(410): unsure at all n locations
cccacgcgtccgcccacgcgtccgcacggcagtggcatcggcacgtgtggtgccgggtgccctggggtgtctatctgatggaggtgtggatgtcgggttggagctgtgcataagtgtgcaggaggaggcgctgagcggcagcgcgtcaccagcggaggcaggtcatgctgtgcacgatcggtttggacgtcttgaaaacagggtggaggcttggcagcagcagccagcgggtangtttggcnacccgttcgcagataacgtgtccaccctcaatcgcaaggctattgtggagctcgcctgggagctgaatgtcaagctcaccaatgcccgcatcaagctgcgtagccaggaggatgagtagccgcctgggcatcagcatcagcggcggtagcaacaccggcggcagtgcc

SEQ ID NO: 1510 - DNA, 408 bp, Chlorella vulgaris
gagggctaccgcaccaacggcggcggctgggagtgggccgagggcctggacaacctgtaccccggcggcgactactttgaccccctgggcctggccgacgaccccgaggccctggccgagctcaaggtcaaggagatcaagaacggccgcctggccatggtctccatgctgggcttcttcgtgcaggccatcgtcaccggcaagggcccacttgagaacctgctggaccacctggaggagcccggcaacaacctgtgggccctgtccgccaccctggccaactaagcggcccgccagccctggccagcaaagactgactgagcaggagtgacagccgtgaggtggtcgtgtggagtgcgaccgctgagaagaatacttgtgtgggtgtgtgcatgtaataagacctag

SEQ ID NO: 1511 - DNA, 368 bp, Chlorella vulgaris
cccaagcgtccgcccacgcgtccgcccacgcgtccggtttgtaggcccatctgtagcggcagccaggcacgatggtgcagattggcaagaaggctgctagcggccctaagaagggcaagaaggccctgaccttcaccatcgactgctccaagcctgtggaggacaagattatggagattgcctccttcgagaagttcctccttgacaagatcaaggttgagggcaagacaggcatcctgggtgacaacgtcaaggttgtgcgcgagaagaccaagatcacggtgaccagcgagattgccatgagcaagcgctacctcaagtacctcaccaagaagtacctgaagaagcacaacgtgcgtgactggctg

SEQ ID NO: 1512 - DNA, 322 bp, Chlorella vulgaris
agcccacgcgtccgcccacgcgtccgaaaaaaaaaaaaaaaaaaaaatatataaaaaaagggaaaaaaaagaaagccaaaaaggccggctccacaagtggttctcctgcaacctacgattcccatggacatcaacagctccatcaaactggtgctcaagatcgttttagttcacgacggtttcgcacaccgtctggacgatgcctgcatggttattcagcgcagtcaggttcagttatgtatcctctttgacaactgcaactagcccgactattgtaatctgattgaggtcctgtgcctttagcacagcttcaatgtcattg

SEQ ID NO: 1513 - DNA, 403 bp, Chlorella vulgaris
gccggcgtggccagcttcggcgacgctgctgtgtggttcaaggctggtgcctccatcttcggcgatgatggcctgaactacctgggcaacccctccctggtccatgcccagtccatcgtggccaccctggccgtgcaggtcatcctcatggctcaggctgaggctttccgtgtgagcggcactgccccctggagcggcgaggagctcgacaccctgtaccccggtgatgcctttgacccccttggcctggctgacgaccccgacacctttgctgagctcaaggtcaaggagatcaagaacggccgcctggctatgttctccatgttcggcttcttcatccaggcacttgtgaccggcaagtctcccctggagaacctggccgaccacctggctgaccccgcct

SEQ ID NO: 1514 - DNA, 406 bp, Chlorella vulgaris
agcccacgcgtccgcggacgcgtgggaaggccgtgtggagccagggcatcaagaacgtgcccaaccgcctgcgcattgtgatccagcgcaagcgcaacgaggacgacgacgagaaggaggagatgttctccctggtcaccctggccgaggaccagagcagcaagggcaagggcgtggtggtcctggaggcataaacacacacacgcgcctcgcggggggagctgccgcagcagccagctggcaggttccgtgcctggggatcgcgctgggcctcgcgtgggccttgcctttcaaacggttggtgtgggcggcgtttctggcggcgtttagggtctcttgcagacccttggtcgttgtgcaggccccagatgtcgctgtatcgaacccagctggcggtgccctgttg

SEQ ID NO: 1515 - DNA, 409 bp, Chlorella vulgaris
ggaggcgccccaagggtattgactcgcgggtgcgcaggaagttcaagggatgcggcgtgaatatgcctaacatcggctatggcaccaacaagaagaccaggcacctcctgcccaacggcttctacaagtttgttgtgagcaacgtgaaggacctggagctgctgatgatgcacaaccgcaagtactgcgccgagatcgcgcacaacgtgtccaccctcaagcgcaaggcgattgtggagcgcgccggggagctgaatgtcaagctcaccaatgccggcagcaggctgcgtagccaggaggacgagtagccgcctgggcctcagcagcagcggcggtagcagcaacggcggcagtgccagcgtatcagccattgcgttggcacagctgctcgatagatgtaatccaaccc

SEQ ID NO: 1516 - DNA, 458 bp, Chlorella vulgaris
cgccattccaagcgcggtgcccaggctagggctcccacactgctgttcgccagcgcaacacctggtagttggacggctgtggcgttggagtgggctggcatggatatggtattgccttgaggtagattctgatatgctgcttgtgtttaggatggccagttggcatgcagatggcgtgggcttgcttctttcttacaccttcatggtatccacctaaacctcaatgtcttgaactgtgctgcctggcaattcgtggacctactaggtgctgcctggcaattcgtggacctactaggagcaaggatatttctgtgcactggttgatccgccatgagcggtggttgaccaccgatcatgtgtgggtctttatcatcctcctgctggattgtacctggcaagctactgcttgtgggttgcaggctatttatgtaggccggtggcgctccttctcattttgt

SEQ ID NO: 1517 - DNA, 460 bp, Chlorella vulgaris
cgatggtgctgtcgtgcgacatcgatctcctgcatcctccccaggagctggagaagcggaagcacaagctcaagcgccttgtagcttctcccaactcctatttcatggacgtcaagtgccaggggtgcttcaccatcacgaccgtgttcagccactcccagacggtggtggtgtgccccagctgcaacaccgtgctgtgcgtgcccaccggcggcaaggcccgcctcacagagggctgctccttccgcaggaagggcgattagtcaggggaggcgctacgctggcatgtggtctcaagaaagtgcgccgccgcggcttgaggactcttgccagcgggacagcgcggcctatcaggacaggaacaggaagggagcgaagaagatttgcaaagcatggaaagagggttgttagggattgggttgcagcgccccgcccagtcaggatactcttcagccacccc

SEQ ID NO: 1518 - DNA, 461 bp, Chlorella vulgaris
ggcagctggcaccgcatggcgctgaccgtgcgcatgaacgacgtgggccaggccaacggctctgtggaggtcaaactgaatggggagcgtaagctctactatgaccaggtcaactaccgcaccaagccaggcattcaagtggatagcatctactactgcaccttctttgggggcaacgacgccacctgggcaccgccacacgacacctacctcctgttcaagaatatccgcatttactccctggatccccccagcatcgcaacctccgtggaacccccctcggtccaggtggctgtgacgctgccattgcaggatgaggagccacggtactaggctgctcttggatacccagcttattgcgcacgttggtatgctagactgtgacttgttgccacgattgagagtgtgtgtgtaattggttgctcggagcttgctgtgggctgggatgcgctggcactggg

SEQ ID NO: 1519 - DNA, 275 bp, Chlorella vulgaris
ggtcccaagtggcggcttgcatgtgtggtttcgattagacaaacacatcccccgacacacaagcggagaatgcggcaacatgaccatgacatatcatattaatccacctacactggaacatagacgaggacccccagatatccaatgtaagtaggtttgagcgaaccatgagtctagtcattgagctgtcggaagccactttacttgccctctcccgtcgtcaactaatcatcgctgacgataccgcatagtccgaatttgtatgtttggtgggc

SEQ ID NO: 1520 - DNA, 367 bp, Chlorella vulgaris
cggacgcgtgggcaagactgagctgcgcgagaagctgtccaagatgtacgacgtcaaggactccaactgcgtgtttgtctttggcctgaagacccagtttggtggcggcaagtccacagggtttggcctcatctacgacaacgtccagggggccaagcagttcgagcccaagtacaggctcatcaggaacggtctggcgcagccggtgcagaagtcgcgcaagcagcagaaggagcgcaagaaccgcaccaagaccatccgcggtgtcaagaagaacgcagtggccggcaagaagtgagcgggcagcagcatgcagccctgagccagcctgcagctctagtaccgcctgtaacaaacctagcaagtg

SEQ ID NO: 1521 - DNA, 368 bp, Chlorella vulgaris
gcttctgtgggctgtgagcagcaggggggctgccacaatgaaacagctagtctcttcccgcaccatcgacatcccttcgggggtggagattgaagtcaaggcgcgtaaggtccgcgtcaagggccctcgtggcaccctgacccgcgacttcaagcacctggcggtggacatgttcctgtccgaggaggagggcgtgaagaagcttaacgtggactgccactttggcaagcgcaaaagcctggcagctatccgcacagccacctcccacgtgcagaacctgatcactggcgtgaccaagggctacgagtacaagatgcgcctggtgtatgcccatttccccatcaacatcaacatccaagattgaagca

SEQ ID NO: 1522 - DNA, 235 bp, Chlorella vulgaris
cccacgcgtccgctcgcgcggcgtgtgctgccagcaaggcagcaaggattggtggtagcatggagggcacccgcagcggcggcacgagtggcggcagcggtgctggtggtgtgcgcgcttgagcagggctgcggctgcggctgcctagcacacgcagcatgtgttgggaagcacttctgtctagatgcaagtgtaaccaagcagtgaggctactgtgtaagggcaacacacctgc

SEQ ID NO: 1523 - DNA, 403 bp, Chlorella vulgaris
cccacgcgtccgcggacgcgtggggggctgtccgtcgccaagaagagcggcagacaaaatggatacgcccgtgaagctggccatcgtgatgaaggtcatcggcaggactggcagccgtggtcaggtgacccaggtgcgcgtgaagttcctggatgaccagaaccgcctgatcatgcgcaacgtcaaggggcccgtgcgcgagggtgacatcctgaccctccttgagtctgagcgcgaggctcgtcgcctccggtaatgcgggaggagctgggggcgctggcgcaagatgtgacccctgcgcgcctggaacagcagtgtgtggatggcgtgcagcgtgtagcagcagcactggcagaggcgggctgggtgggcccctttgtgtgcagctgagacgtgttgagcg

SEQ ID NO: 1524 - DNA, 454 bp, Chlorella vulgaris
gttcattacccttgaacccgtcgtccaacagcttagcatgtaccccctgagcggcttctggaacaacccagcacacccttacaccatggcagccaacattgcatgggcagtcttgattgggtgggcgctggttttggcccacttggccacggcactggttcaggcgctgacggttatcaatattggcactgcgcttacaaacatagagatggccaaatatgtcatctggccattcgggcgggagatacatcgtcgagagctgcccacaacgctggcagacttgtatttatcgcggctgccccccaccccatcggagaatcggacggaagcatgggtctaaccggttgtagcgagtggcggttcaagtgacgcctgggacgcatgttggcaggagataggctgtgacggccctgggtgggttgtgctctggcgacgctgcgtgtgaaatgtgttg

SEQ ID NO: 1525 - DNA, 451 bp, Chlorella vulgaris
cgcgtccgcgaaagcatccgtggacccgtcgtccaacaacttatcatgtaacccctgagcggcttcgggaacaacccagcacacccttacaccatggcagccaacattgcatgggcagtcttgattgggtgggcgctggttttggcccacttggccacggcactggttcaggcgctgactgttatcaatattggcactgcgcttacaaacatagagatggccaaatatgtcatctggccagtcgggcgggagatacatcgtcgagagctgcccacaacgctggcagacttgtatttatcgcggctgcacctcaccccatcggagaatctgacggaagcatgggtctaaccggttgtagccagtggcggttcaagtgacacctgtgacgcatgttggcaggacataggctgtgaccgccctgggtgggttgtgccctggcgacgcctcgtgt

SEQ ID NO: 1526 - DNA, 416 bp, Chlorella vulgaris
ctagttctagatggcggagtcggtgcagaccttcgggcgcaagaagaatgcagtggctgtggcctactgcaagcgtggaaagggggagctgaggctcaatggctcccctctggaccttatccagcctgacaccatgcgctacaaggtgctggagcctgtgctgctcctgggcaagcagcggtttgccaacgtggacatccgcatccgcgtcaagggcggcggccatgtgtctcagatctacgccatccgccaggccatcgccaaggcgctagtggccttctaccagaagtacgtggatgagcagagcaagaacgagatcaaggacatcctgctgcagtacgacaggacactgctggtcgccgatcctcgccgctctgagcccaagaagtttggcggtcatggtgcccgcgctcgct

SEQ ID NO: 1527 - DNA, 401 bp, Chlorella vulgaris
agcatcactcagcaatccggtacaagcgcggcagtcacaatggcgaggaccgagcaaacttttgtgatgctgaagccccgatgcggtgcacaggaacatcatcggcgtggtcattgatcgcttcctgagcaagggctacatcctacgcggccttaagttcatgaacgtgactaaggatcatgctgagcgccactatgctgacctggcctccaagcccttcttcccaggcctgatcgagtacattaccagcggccctgtggtggccatcgtgcttgagggcaaggacgtggttgtccaggcccgcaagatcatcggtgccaccaacccgctggcctccgactcctccaccattcgcggccagtatgccatcgacgtgggccgcaacatcatccacgggtccg

SEQ ID NO: 1528 - DNA, 395 bp, Chlorella vulgaris
aggttggaccaagggctgtggaggcgttttaaatataaaaatgcctcccaaatttgatcccaactccattgtggaggtgtacgtgcgtgccaccggcggtgaggtcggtgccgcatcctccctcgcccccaagattggtcccctgggtctctcccccaagaaggttggtgaggacattgccaaggagacgtccaaggagtggaagggtctgcgcgtgaccgtcaagctgacggtgcagaaccggcaggccaaggtgaccgtcatcccctccgccgcggcgctggtcatcaaggcgctcaaggagccgcccagggacaggaagaaggagaagaacatcaagcacagcggcaacctgtcaatcgatgacgtgatcgagattgcgcgcatcatgcgca

SEQ ID NO: 1529 - DNA, 155 bp, Chlorella vulgaris
cggacatctagatgctgcatgtcgcgtatccgcggtggtcacacagaacatcaacgcaaatgacacgggccatgccccaggggctgcgagagctatctcactgcagccatttcgcaccaaatcccttgcagccgcaggtgaccaagtaacctcat

SEQ ID NO: 1530 - DNA, 363 bp, Chlorella vulgaris
ccctgaccgtccgccccacccgtgtattcggggccaagcccatgaaggctcgcgctactcgcggcatgaaggtgcaggcctacaaggtcaccctcaagacccccagcggcgatagtgtgatcgagtgctccgaggatacctatatcctgcacgctgctgatgaggctggcgttgagctgccctactcttgccgcgctggtgcctgctcttcttgcgctggcaagatcgattctggcgaagttgaccagagcgacggctccttccttgaggacgatcagattgccaagggctttgtgctgacctgcgtgacataccccaagggtgacgtgaccatcatcacccaccaggaggatgcactctact

SEQ ID NO: 1531 - DNA, 107 bp, Chlorella vulgaris
cccacgcgtccgcttctgagctgttgcctgtagacgggcacagacacaccgttgctggtcaagttcacggcccacgggttggcaacgtcatcaacaacagtgtgtct

SEQ ID NO: 1532 - DNA, 400 bp, Chlorella vulgaris
cccatgcattgccatgtgagtcgtgacctgcacccggcaaaatgtcgagccaacttgtgtgggagcttgtgaagcacaacaacgcattccttgtgaagggcgtgaacggcaccgtgttcagccgggaggctggtaacctgtataaccgcaactcctacaagtattctggcctggccaacttcaactccactgtggatgttgctgcggctaaggatggcggggtgcaggtgtccaagtcccgtggcaagaacgccagcaagcccagcgctgcccgtgctgtgtctgtaatcaagaagaacgctcgccgcaccaactacgctgtcggcgctgaggcgcagcgcgtgcgccccgacctcaagaaggctgccgttgcccgtgcctccgccgtcaccaagagcca

SEQ ID NO: 1533 - DNA, 457 bp, Chlorella vulgaris
cccacgcgtccggagatttctgccttggagtccgctgccccttttcctgggcggatgtggggatatagccgaggcaccagtattgcatcacgctgaggccaagtgggtgggcccaagcgcttcggctgcaatgtggtgcgttcagacgagcaaagcgtgcattcctttctgtctgagtactgccgcggatccttgccggcattgtccactcctatgttttggcagataccttgattgcttcgagataggtgcaccttgtcaatcctgccacactgttgtgccgctggatgaacctgccatttgttgtgggttgcctttgtagccagggcttttgttgtatgacagtgtatctctcctcagcaggccagcacttgtaggcatcgtgcgctgccctatggagtactaaggactgagctcatattgtgttttgtctccttgcggtgttttagactagcac

SEQ ID NO: 1534 - DNA, 407 bp, Chlorella vulgaris
cccacgcgtccgcaacaagatgctttcgtgcgccggggctgataggctccagaccggcatgcgcggcgccttcggcaagccctttggcgtggctgcccgcgtcggcatcggccagatcctgctctccatccgctgcagggagcagcacgcagtggtggctgaggaggctctgcgccgtgccaagttcaagttccccggccgccagaagatcgtggctagcaggaactggggcttcaccgactacctgcgcgacgactacctggagtggaagcgcgagggccgcctggtgaacgatggcgtgaacgtcaagctgctgggctgccacggccccctggagaagcgcgagtctgcgcacatcttccccacgcccgcccgcctctaccggacccccgtgcacggctctgacg

SEQ ID NO: 1535 - DNA, 308 bp, Chlorella vulgaris
cgcctcagtttgtgctggagaagagggccggccccagcgtgctgcgggtggtgtttgctcaagcacccgagaagaccgtggtggtcactgtagttgagaaaggccagccccaacagagtgctagccagcagcagggcagcagcgacacgcagcagcagtggtaccagagcgagggtgacgccacaagtcctggtgctacacttgtcacgcccagtgaataaaacaggtaggaacaagaccgtgcggccctgagtatagttgaggagccacctggcacctggcaaccagcctgtaacctcgattagcac

SEQ ID NO: 1536 - DNA, 459 bp, Chlorella vulgaris
  unsure (1)..(459): unsure at all n locations
aatgcgggcaaggacgcgttccacctccgcgtgcgcgtgcaccccttccacgtgctgcgcatcaacaagatgctttcgtgcgccggggctgataggctccagaccggcatgcgcggcgccttcggcaagccctttggcgtggctgcccgcgtcggcatcggccagatcctgctctccatccgctgcagggagcagcacgcagtggtggctgaggaggctctgcgccgtgccaagttcaagttccccggccgccagaagatcgtggctagcaggaactggggcttcaccgactacctgcgcgacgactacctggagtggaagcgcgagggccgcctggtgaacgatggcgtgaacgtcaagctgctgggctgccacggccccctggagaagcgcgagtctgcgcacatcttcnccacgcccgcccgcctctaccggacccccgtgcacggctctgacgac

SEQ ID NO: 1537 - DNA, 447 bp, Chlorella vulgaris
cccacgcgtccgcccacgcgtccgcccacgcgtccggggttgcattaggggttccggtctaagcagcaatcatggctgaccagaccgagagggccttccagcgtcagctcggcgtgtcccgggggtaccagaagattggcaagaagaaggtccccggcaagggtggcgagcggtggtacaagaacattggcctgggcttcaagacccccaaggaggccattgagggcaactacattgaccacaagtgccccttcaccggcaacgtgtccatccgcggccgtatccttgccggcaaggtcaagtccaccaagatgaaccgcaccattgtgatgcgccgcgactacctgcactacatcaagaagtaccagcgatatgagaagcgccacaccaacatctccgcccacatcagcccttgcttccgctgctcggagggcgacaccgtcatca

SEQ ID NO: 1538 - DNA, 428 bp, Chlorella vulgaris
cggggtcaaccaagccttcggccaagccttcggccctggtgtttgggcaacagggagcaatacataatggggaattgacctcaaggccggggggcgcaacaagcgggtccacaggaccgcccccaagagcgacaacccctatctcaagctgctcgtgaagctgtaccggttcctggtgcgccggaccgactctgacttcaacaaggtcgtcctcaagcgcctcttcatgtccaagaccaacaggccgcccctgtccctctccaagcttgccaagttcatggccggcaaggaggacaagattgccgtgcttgtcggcaccgtcaccgacgatgtgcgcctgtacgaggtgcccaagctgcgtgttgcggcgctgcgtgtgaccgagacggcccgcgcccgcatcctcaaggccggcggcgagatcctga

SEQ ID NO: 1539 - DNA, 394 bp, Chlorella vulgaris
gcttgttgtagagaggcccgtagtgcaggatcagcagccgcagcagcagcagccacgagaagaggaaacttgccgtctttcgcttgtccaacgtttcgttttggtatctcaggacgtcgtcgcagccatgtacccatttctcacagtgttattgtgaggctagaataccttgccccagctgatacactgctgctccttgtgagctggtactacagatcctgttgcttgtatcaggcactgatggggaggttgtaataacatgaatctgtaaaaaaaggactaatatatcgagaaccgtgtcagaaaatgtgcacctgtgcaagagtgccaaacctgcctaatgcaggcctacgtgtaaacgaaacaagcaaaaaagggggggccccccgaaagg

SEQ ID NO: 1540 - DNA, 394 bp, Chlorella vulgaris
tttaacctttttactacgttaaaaagacacttgttaaaaaagctggctttttttttttaaaaaaaagatagccagcttttttactacgatctttttttactatgtgtcttttttacaaagtaaaaaagctaaaagcacgcttcgctaaaaaagacaaaatgtaaaaaagagaaataaaagcagtaaaaaaaaacgccaataataaaaaataaaatatagtgattttaatctgtaacaacaatctacgttgttgtggatatttaacaaaaattttgtgtatttagacaagtgaaactttccaagtaaagcattgagaaaatctcaatgctttacttggaggttctttccatgctattcttgatgctttgcatcaagaactgcatggaggtgttac

SEQ ID NO: 1541 - DNA, 387 bp, Chlorella vulgaris
cccacgcgtccgcgactggacgtgcggcagcagcgacgatggtgctgtcgtgcgacatcgatctcctgcatcctccccaggagctggagaagcggaagcacaagctcaagcgccttgtagcttctcccaactcctatttcatggacgtcaagtgccaggggtgcttcaccatcacgaccgtgttcagccactcccagacggtggtggtgtgccccagctgcaacaccgtgctgtgcgtgcccaccggcggcaaggcccgcctcacagagggctgctccttccgcaggaagggcgattagtcaggggaggcgctacgctggcatgtggtctcaagaaagtgcgccgccgcggcttgaggactcttgccagcgggacagcgcggcctat

SEQ ID NO: 1542 - DNA, 397 bp, Chlorella vulgaris
cccacgcgtccgcggacgcgtggggtgccacccatcttgcgctggtatcagcaaactcggcaggatggtgcggatttcggtgctgggcgatgccctgagtaagtatataagatgcttgtttcccttggcatagcgctaccccacccaccttgcgtgggtcgggggtgaccgtgccttgagcatggtcaaagcgaatttgccttagtactgacctggtcttgttgcttgtcttgcggcagagactctctacaatgctgagaagcgcggaaagaagcaggtgctgcttcgcccatcctccaaggtggtcatcaagttcctccaggtcatgatgaagcatggctacattgggtgattttgattttgtggacaaccaccgctctggcaagatcgtggtgga

SEQ ID NO: 1543 - DNA, 365 bp, Chlorella vulgaris
cgagggtgctgtgccttcctacctgaacggcgagttcgctggtgactacggctgggacaccgccggcctgtccgccgaccccgagaccttcaagcgctaccgccagattgaggtcatccatgcccgctgggccatgcttggcgccctgggctgcatcttgcccgaggtcctgcagaggtacagcggcatcgagttcggcgaggctgtgtggttcaaggctggcgctcagatcttctctgacgacggcctgaactacctgggcaaccctgccctcatccacgcccagtccatcattgccaccctcatcacccaggtggtgctgatgggcgccgttgagggctaccgcaccaacggcggcggctggg

SEQ ID NO: 1544 - DNA, 385 bp, Chlorella vulgaris
ggaccttaaacacgactggttatggactgtgtggtgctgggagcgagttgagtttactcctcctgtgtgcactggggctccctaatcccaatccccatgtgcactggttggacgggttttgggagtttcccgtctgacacccatgcaccccagccccagatcgaaccccggccgatatactagctgggcggcttggagttaaggcgcccaagttgaggattcaagcctccatatccatgaaagcgagggctagcgagccatgtgatgaaggggtggcggccagctagcagcgctcgagtggtgcatgccattaaaccggtcactgtcagtgtgtcaatcctagctgtgattttcaagaccaaggtcgttccattgtggtgggaat

SEQ ID NO: 1545 - DNA, 458 bp, Chlorella vulgaris
cccacgcgtccgggtcgatcggatcattgcaccaactgcagaccactacaatggcgtcatccgtgtgcatgcccgtggctgctgcaagcctgcggtacactcaggccgcccgtgtggccttcaaaggccagcccctgaaggctgtgccactccgtgctgctcgcaagcagatcagcaccctatgcaaggcggcggcccctctggttggcagcactgcccctgacttctcagccaccgctgtgttcgaccaggagtttattgacgtgaagctctctcagtaccgcggcaagtatgtggtgctgttcttctaccctttggatttcacttttgtgtgccccactgagatcaccgccttctctgaccgccatgacgagttcaaggcagtggacaccgaggtgctgggcgtgtcggtggactcccagttctcacacctggcctggatccagactgaccgcaag

SEQ ID NO: 1546 - DNA, 403 bp, Chlorella vulgaris
  unsure (1)..(403): unsure at all n locations
cttcgtggtgctgggctaccgccttgatcactgctattggagttttgagcaggcaagtggccgcctccctttctctctttcatgcatgtgtgcctcaggccgcatatatataatggaacctgtgtgcgctacatatgaatattggcgtcgtgaggcgcggtgtttcattggcagtccccccctttgatataaacttggcattgtgtatgggcctgagcctccaatgtggcatggcctcatgcaaaattttgtgcctacatgcttcncctttgtgcttatgagatgattttcacccaccacctttttgcactggtggacgccgttggtcgtgtgaagtgaaaaccgtcgaattcttcatatgcctaggcgcctagcgcgtgcacgaaagtgatggtagcgaacc

SEQ ID NO: 1547 - DNA, 463 bp, Chlorella vulgaris
  unsure (1)..(463): unsure at all n locations
cccacgcgtccgcgggcgccgagatcaagctgcccttcaacatcctgggcctggtggcgtttgagctctttgccatgcactgggtggaggtgaagcgtggtctggacctgaaggaccccggcagccaggactttgaccccgtgttccagggcaacaagctcaagccccatgaggttggctaccccggcttcacaatctttgtgcccggcgacatggaggagctgaagctgaaggagattaagaacggccgcctggccatgcttgcctttgccggctttgtgatggcggcgcaggtgaccggcctcaacccgctggcagcgctggggcagcacctcgcagaccccatcaacaccaccatgttctccaaggccgtcgttgtgcccggccaggcgatcacccccggctgcgccatcccctcatctgtgaactacgaaggcctcnacatccccaccccctgcctctt

SEQ ID NO: 1548 - DNA, 154 bp, Chlorella vulgaris
caagactctagagagagtcgtattatcgcgattatcatcctggccttcggcatcatgagcctggtcgagtttgagctctttgccatgcactgggtggacgtaaaccgtgctctggaccttaacgagttcggcatgcaccgactttgaccccgat

SEQ ID NO: 1549 - DNA, 411 bp, Chlorella vulgaris
  unsure (1)..(411): unsure at all n locations
accagcgtcgcagcggtaccagaccataagcacggcagccgccggacaacgagcggcagctagcaccgacaagctacatcatggcggtcggcaagaacaagcgcctgtccaagggcaagaagggtggcaagaagaagattgtggaccccttcagcaagaaggactggtatgacatcaaggcacccagcgccttcaatacccgcaatgtgggcaagactctggtcaccaggacccagggtaccaagatcgcctcagacggtctgaagggccgtgtgatcgaggtgtccctagccgacctgcagaacaatgaggctgatgcctaccgcaacatcaagctgcgcattgaggacgtccagggccgcaactgcctcaccaacttctacggcatggacctgnacaccgacaagctgc

SEQ ID NO: 1550 - DNA, 387 bp, Chlorella vulgaris
cggacgcgtgggcattcgctcaaggacttcgtacttcccactgacgctgcgccctttcaggtgtcaaacgagcaaatatgaagctcctggtattgatcctcgcgcttgttggtgccgcacaagccaggcgcatactggcagatagctgtaaggggcaaggcctgttcccagtccctggcagcgagtgctctgacaagttctggtcatgttctgccactggcgccacacctgtggagatgtcgtgtgcagcagggactgtgtttgacccttcaatctcctcttgcaactttgcctcggccgtgtccagctgcccatatgtcactggaaagtgcccgggcgctggcagctttgcaaacggcgccatctgcagcagcaagttctggtcct

SEQ ID NO: 1551 - DNA, 387 bp, Chlorella vulgaris
gccatttggcatgcaaatggcgtgggcttgcttctttccttacaccttcatggtatccacctaaacctcaatgtcttgaactgtgctgcctggcaattcgtggacctactaggtgctgcctggcaattcgtggacctactaggagcaaggatatttctgtgcactggttgatccgccatgagcggtggttgaccaccgatcatgtgtgggtctttatcatcctcctgctggattgtacctggcaagctactgcttgtgggttgcaggctatttatgtaggccggtggcgctccttctcattttgtattgtgaggtattgcttgcatttgattcagttgcctatactgatgtcattgcaatacatgtccttgtccttgggctggaatg

SEQ ID NO: 1552 - DNA, 376 bp, Chlorella vulgaris
cggacgcgtggggtccaacaagtttgtggacgacagaggaacccgcagggagcacgtggagaacgagtttaagtgggatggcaagacgctggcaaacataggcctctgggcctttgccttcccatatttcgtctactctgtgtgcgtgaaggagtttgataagtctgatgaagttgcccaccggagcaagaggccgttctggggatacagtgaggaatgaggccgagggtcccggcttgacaaggtgtagagcacacgcagctttggcggaagtgcccagcaggaggccttttctaagctggcagccagtgttttaggctgcaaggcaccctgaaactgctttgagctaccaccccattcgtcatacgggcgcctg

SEQ ID NO: 1553 - DNA, 402 bp, Chlorella vulgaris
gcggcttcacaatgtcgaagcggaccaagaaggtcggcattgtgggcaagtacgggactcgctatggtgcgagtctgcgtaagcagattaagaagattgaggtcagccagcattccaagtacttctgcaccttctgcggcaagttctccatgaagcgccaggctgtcggcatttggcagtgcaaggcctgcaagaagacccttgctggtggcgcctacgtgtgcaacaccgccgccgccgtgactgtccgctccaccatccgccgtctccgcgagcagattgagaagtaagcagccaaacccagaaaggcagccgctacatcagcagcagcccaaccactagcccagcgtgcaggcgccgtggatgccagtattttggggcgccgaccatgacagccttggg

SEQ ID NO: 1554 - DNA, 195 bp, Chlorella vulgaris
ctctggaagaaggggggcagtggcatggcgaggtgggcagcaagtggcacgagcgggtgctgctggcacacgctatgtggcagtagtgattatgcagttgtgcacaggcgtgcagggggctgtgagggctttactgattgtgctgaggcaaaggccctggattgggcctttggacggctagctggtaaattggtg

SEQ ID NO: 1555 - DNA, 378 bp, Chlorella vulgaris
ggcttcacgctggaggagctcaaggaggctggcattccctccaagcttgcccccaccattggcattgcagtggaccaccgccgcaagaacaggtcccttgaggggcttcaggagaatgtgaaccgcctgaaggcctacaaggccaacctggtggtgttcccgcgccgcgccggcaagcccaaggccggcgatgccagcgcggaggagctcaaggcggtcgcgcagctcagcggcccggtgctgcccgtcacacgcgctgcgcccgctctggagaaggttgccatcaccgccgagatgaaggccgagaaggcataccacaccctgcgcacggagcgcatgaatgcccgcctggttggcgtgcgcgccaagcgcgccgca

SEQ ID NO: 1556 - DNA, 461 bp, Chlorella vulgaris
gggagcataacataatggggattgacctcaaggccgggggccgcaacaagcgggtccacaggaccgcccccaagagcgacaacccctatctcaagctgctcgtgaagctgtaccggttcctggtgcgccggaccgactctgacttcaacaaggtcgtcctcaagcgcctcttcatgtccaagaccaacaggccgcccctgtccctctccaagcttgccaagttcatggccggcaaggaggacaagattgccgtgcttgtcggcaccgtcaccgacgatgtgcgcctgtacgaggtgcccaagctgcgtgttgcggcgctgcgtgtgaccgagacggcccgcgcccgcatcctcaaggcgggcggcgagatcctgacctttgaccagctggcgctgctggcgcccaccggctccaacacagtgctgctgcgcgggcccaagaactcgcgcgaggccgtgaac

SEQ ID NO: 1557 - DNA, 407 bp, Chlorella vulgaris
ccagaacatacgggatggttcgagatctgggtgggcggacgccttgtgcactccaaacagaatggagctgggagggttgacacacccgaggcatggagacacatttgcgacctcattcagcaggagatggaggagagggccagcagtgacgagagtgacaaataggggcagacttaacctagcctgctggcgctcctgctgccgggtcacctggggcaccctgaattaaccgggagctacgctgaggaggggtgggaacgggaagcgggtgggaaggcatgctgtcccgtggtggtgccttgctgccgtggcgccaaggctccgggcttatgactggcggcgcataaagggtagcaccacgctgtgctgctcaggcgtctgccatgagaggttctcgagggctgggt

SEQ ID NO: 1558 - DNA, 387 bp, Chlorella vulgaris
cccacgcgtccgctcttctttgctggctggttggtgatcatggtgctgtgtgccatcttcctgctgcctgagaccaagggggtgcccatcgagcgcgtccaggcactctatgcccgccactggttctggaacagggtgatgggtcccgctgccgctgaggtcattgctgaggacgagaagcgtgtggcagccgcaagcgccatcatcaaggaggaggagctgtcaaaggcgatgaagtaaggtctgggcagtggcgctcttatagatttatcttcagggagaagaacaacagggacaggagaaggcactcggtgtgccagtgctagatgagagttacctgctcggacgtggggctgttttctcacatcccttctctcctaagggatg

SEQ ID NO: 1559 - DNA, 464 bp, Chlorella vulgaris
  unsure (1)..(464): unsure at all n locations
ggggcgccccacgacgtccgccaagggctggctgccctggccaccgagggtgtgctggaccagatcaagcggcagcgagacgccgaggagcgggcaaagctggaggagaaggccaaagcacaggccatggccaccgcgctggccaccattggtaagttcatcatcaagaagaaggtgggcgccaacgaccagatcttcggcagcgtcagcgcagcggacgtgattgaggcgatccgcatgcagacggggcgcgagctggacaagaggaccctcaccctgcctgacatcaaggtgcttggcacgtacgatgcctccgtcaagctccatccanaggttgtgggtcaattcaaggttgttgtgcagaaggacacccgggcctgaaagctaggctggcagcggttggggagtttaccactagcagcactagtgcgggggttgccagtgcatgtaacagaacagaagcc

SEQ ID NO: 1560 - DNA, 380 bp, Chlorella vulgaris
tgccgcatcctccctcgcccccaagattggtcccctgggtctctcccccaagaaggttggtgaggacattgccaaggagacgtccaaggagtggaagggtctgcgcgtgaccgtcaagctgacggtgcagaaccggcaggccaaggtgaccgtcatcccctccgccgcggcgctggtcatcaaggcgctcaaggagccgcccagggacaggaagaaggagaagaacatcaagcacagcggcaacctgtcaatcgatgacgtgatcgagattgcgcgcatcatgcgcaaccgcagctgcgccgcctcctttgccggcagcgtcaaggagatcctgggcacctgcgtcagcgtgggctgcaccgttgagcacgaggaccccc

SEQ ID NO: 1561 - DNA, 372 bp, Chlorella vulgaris
gtgcaaccaaagccgccagaatgcagaccaccttcgtgggcaccacccaggcgctgcgcgccaaggtctccacccaggccactcgtggctccaaggtagcaacctccatgcgccgcaccgtcaagtccaagaacgtgaagaccaccgacaccagccagtggtacggtcccgaccgccccaagttcctgggccccttctccgagggtgctgtgccttcctacctgaacggcgagttcgctggtgactacggctgggacaccgccggcctgtccgccgaccccgagaccttcaagcgctaccgccagattgaggtcatccatgcccgctgggccatgcttggcgccctgggctgcatcttgcccgaggtcctgc

SEQ ID NO: 1562 - DNA, 338 bp, Chlorella vulgaris
atgatgcctcccctctcttttgccaggtggcacttactgccaaactgttgtcatttggcccccccagcggcatgcaagggtgcacgcatgctgggaggagttgagtaactgataggcaggcgaaccctctgcgtggataagtgctgttcagactacgcacatggcaccgcacaccgtgtagccacctggacaggcggcaggctgcaacctaggacatgtcggctgggcgacactttgctggcatggcatgcaggggcacaccggttggccgtgtactcccattacggcgttaaaactgtcagggcgatggcacttcatgagaacatgccaagtattgc

SEQ ID NO: 1563 - DNA, 393 bp, Chlorella vulgaris
gccctattcttgtgcggtctgtaaggcgcattgccagaagccagcgtccgccgggcaaaacaagccaccatgaggaacgacgctggcgagattgtggatctgtacatcccacgcaagtgctcgtggaccaacaagctcatcacggccaaggaccacgccagcgtgcaggtcaatattggccacctggatgagaatggcgtgtacactggcagcttcagcacctttgccctgtgcggccaggtccgctccaagggtgaggctgatgccgctatggacctgctctggcagaagaagaaggctgagattggccagcagtgattggagcttgagcgcgggcagcacgctgctgtgcacgctgtgatgccctcggagcaaagccggcagtgcacggtc

SEQ ID NO: 1564 - DNA, 461 bp, Chlorella vulgaris
cccacgcgtccgggcaagatggcgcggggcccaaagaaacatctgaagagattgaatgccccgaagcactggatgctcgacaagcttgggggcatctttgcccccaagccgagcgcgggcccccacaagacccgggagtgcttgccgctcatcctgctgctgaggaacaggctcaagtacgctctgacgggcaaggaggtgacgagcatcctcatgcagcgcctggtagaggttgaccgcaaggtgcgcactgacaagacctaccccgtgggcttcatggacgtggtcaccatccccaagaccgacgagcacttccgcctggtctacgactgcaagggccgctttgtggtgcaccgcatcagcaaggaggaggcggcgtacaagctgtgcaaggtccgccgcgtgcagtttggcaagggcggcgtgccctacattgccacccacgacggccgcaccatccg

SEQ ID NO: 1565 - DNA, 373 bp, Chlorella vulgaris
accacgcgtccgcccacgcgtccgcacagccagtcgactcggagcaccatggcagcgatggcttccctgaccgccaggaccgccttcgtgggcaagacccactcccagccccgccaggcggcgaggaggagcagcgtggttgtggctgccagcaggcccatctggtaccctggcaacgatgaggtggtgcccccttacctcgacggcgagctgccaggcgactacggctttgaccccctgcgcctggctgacgaccccgagaaccgcaggtggttggtccactccgagatcttccacgggcgcgtggccatgaccggcgttgcgggcatcctgtacacctcgctggccaatgcctccgggcaggacatccccg

SEQ ID NO: 1566 - DNA, 388 bp, Chlorella vulgaris
cccacgcgtccgcccacgcgtccgaccccgcgcgtcctagcggccatagtcagttgttgcctctggaagaaaggggaccatgaccaccaagcgcaggaaccatggaaggaacaagccagcgggcgcccgtggcaaggtgaagcgtgtgcgctgcgagagttccgccgccatggtccccaaggacaaggcagtgaagcgctttgtggtgcgcaacatcgtggatgcctctgcactgcgcgacatccaggatgcacaggtgtacaacgagtacatgctgcccaagatatacaggaaggtgtactacagtatctccgccgccatccactcccgcatcgtgcgcgtgcgctcccgcaagaaccgccgcaaccgcgagccgcccaagttcgtg

SEQ ID NO: 1567 - DNA, 402 bp, Chlorella vulgaris
  unsure (1)..(402): unsure at all n locations
gacgcgtccgtagaactagtccctgtatggcttaatttatgcaccgatatccccttgcaagcctaccttggttctctcgggccgctctggccttcattgatggcactgtgatgcctcccacacccctttgttttttaggtcccgcaagtgactgcggaagatgaggctgctgcccccgcctcaccggtggacgtcactaagcaggttgggttcggggcgcagtgaggcagcagcaaagcagcagcgctggggtttgggcctggtgttgcgtgctaaccgaccgccggcccgacttttgctggtggctgtttggttgtgtctgggcagtanaggcttggggctggtagcctgtatatgtgaaattgaaggttgcctgtggcattgtatccgttgatgaatgtg

SEQ ID NO: 1568 - DNA, 415 bp, Chlorella vulgaris
  unsure (1)..(415): unsure at all n locations
cccacgcgtccgtgactgaggagcgatccctccccttgaccagctttggactttgatctctaactgcctcgtaaggaccggcgctatgccgctcatatacagctttgtagctaagtcgggcggtggaggagagcctattgtgctggcggactacaccgcgtacacgggcaactttggagtggtggccatccaggccttgcaaaagggagcccagggaaacaacgccaagttcacttattcctgtgacggccacaccttcaactactcttcttcccaaggctacacattcctggcagtggcagatgagcagtttgggcggcaggtgccgtttgccttcttggaaaaggtcaaggaggagttctttgcgaagtggcangacaatgcgcagacagcgattgcacacagcatggacaag

SEQ ID NO: 1569 - DNA, 316 bp, Chlorella vulgaris
  unsure (1)..(316): unsure at all n locations
caaagtcaggacctggttcaaccagcccgctcgcaagctccggaggaggaatgcccgcgccgagaaggccaagaaggtgttcccccgccccaccgcgggcgcgctgaggcccatcgtgcacggccagaccgtcaagtataacatgaagaaacgcgcgggccgcggcttcacgctggaggagctcaaggaggctggcattccctccaagcttgcccccaccattggcattgcagtggaccagcgccgcaagaacaggtcccttgangggcttcaggagaatgtgaaacgcctgaaaggctacaaagccaacctggtg

SEQ ID NO: 1570 - DNA, 338 bp, Chlorella vulgaris
agaaggaggcggccgagggtggcggtggcctggaccagtacgagattgagggccctgaccgccccgagctgctggctgacctggcagagttccagctggcagcgaccctgtacaactgcctgctggagaacaactgctcggagcagtcgtcgcgcatggcggctatggagaactccaccaagaacgcgggagagatgcttggcaagctcacgctcacttacaacaggacccgccaggccagcatttacacagagcttattgagattaacccggggtgccactgccctggcagagaagtagccttgctggtaaaccacttcctggccgtatgggcctgc

SEQ ID NO: 1571 - DNA, 431 bp, Chlorella vulgaris
cagacctgatcatcgagcaccacaccaagcactggaaagcggtgcggcagcacatgcagcggcaggaagcggcgcggcagcagcggtatgttgctcggttgcagacgctcatggcggggggaggtgcagcaggccttgccctggcgccagcaggcttggtagccccggctgcggctgtgcagcagcacccaggcggccctgtcctccaaccagcagggcagtagtctctagccgcggttgagcaattagttgttgacagtcacacacacgtggtgtcatttgccaggcaatgttgtgtcgacttggttgcatggctgtggcttcaaacttgacgttttcttaagtgcgtgtgcgagtgaagtattctatgcacacttggctgcacttccccgacggtgcaaggggtgaattgactgctgcagacagcagcc

SEQ ID NO: 1572 - DNA, 432 bp, Chlorella vulgaris
gggtatccccagcagtatggcccgccccccgggtacccaggtgcgcctccccccatgtatggtggtggcggccagcctcagacaatctatgtgcagcagcagcagcccaaccgaccaggcgcagatgactgctgcacagcctgcttagcggcgctgtgctgctgctgcttgttggacatgatcttctaggtcggtgttgccagccgagcagccagcgggaccaggtcggcagtcgtcagcacgacttgcagcacagcaggtccacagtcagcctgtgcaggcagcaaggctgggggaggggtgcagggtaatttgcagattgcaggacagggaggaagcctgggaaagacagtagtcctgtgaagggagcggcgcagcacccccacgatttgacttaatgcctttggtaatggtggcaggcaatgcggacag

SEQ ID NO: 1573 - DNA, 335 bp, Chlorella vulgaris
gagcgggaggccagggaggacgcccccgagacctacccctacgggctttgaggccacacacacgcatccccacaggaagggcctttgctgttcttcccttcaagctagctttcctagggcagattgcgggaggaagtggggggaggcgggggtggagaaggtgctgctaaagtggctggcgctggcagcacttcttgagttgtttgctgcccaggaaagcttctgagaaagtagctgctaataatggctgcaagtgagcttgtgagaaaatcgcctgtgcgagtattgctacagccatcggcccctcatctgctcatgcgagcggcaaatgcact

SEQ ID NO: 1574 - DNA, 385 bp, Chlorella vulgaris
accacgcgtccgagcgattttatttcctacggaaatcttgttatcgcttttgcagccagtgctgcgccgcacacccgttgcctccttggaagcccaagccccgggtgaccatggtgcccagaacgctgtttctactggggctcctgctggccgcctgccaggctgcacctctagacagcgtttacgacttcgtgactgcaaaccgagacgtcctggaggttacgcttgatatcttacaaaaggcggacctgcaagacttcttcagtgacccagagacaaatgggaccttcctcatctgccctgacgaggttatcctgactacgctgtccgcaaacctcaattctttcgcaaatggcagtagcgtcgcacaagtggtgtctggggt

SEQ ID NO: 1575 - DNA, 427 bp, Chlorella vulgaris
accccttctcaaggccagcggcgcagggctcatcatcatgaactctagtgtggctggcgggcccacagccatgagaagcggcaccctgtatgcaatgactaaggcatccatgaaccaagtagtcaagaactttacatgcgaatgggcaaaagagggggtgcgggcagtggcggtcgcaccctggtacacagcaacaccacttgcggagcaggtattgcaaaacgaggagtatgaggcaggcgtgctggctaggacacccatgggccgggtggcgcagcctagcgaggtggctcgagtggtgaccttcctgtgcagcccggcggccagctacatagctgggtcaactattaccgtggatggaggctacagctccatgggcttctattgaaacatgctgacctgcttggcgctgcttcagttgcgatga

SEQ ID NO: 1576 - DNA, 400 bp, Chlorella vulgaris
cttcgaaattttctgtagtgctacaccttgaaatttagcacttctctcgaacttggtaaccagcttcacaatggctgcatgcatatttcatgttcatgtttcaatcatatgcacatgcaagccttgcttgtgccgccctttgcctttgcttgctgtggaatcaaattgaggcgcaccagtttttaaaatgtgtatttatatagggtggcaggtaatgcgatcggagaggaggtacgggtatacggggctgacagggttgtatagagttatgagcatgggtggcaggtagtgcgaacagcgaggttgagttgagctggattgataggacagttatgctcagttttaactgtgtatgtcatgctagatatctcgttttgcgcgttaggctcctccattgggc

SEQ ID NO: 1577 - DNA, 391 bp, Chlorella vulgaris
ggaacctcagttgcagctactgcatgacatagcactagaaacaatacatcgcttcctgcttccaacaacggtccgttcttggaggtgtccttcaaacgattgctggccacctgtgaaaatatcacttctggaaacgccaaaggtcgtgaggacctatcatcttggcgcagcagcccagtgttccaccactatgtggagacccttcaagagcagctggaggagctttcaggttccagaagccctaaggtagacccggcgctgctgcaccagtaccagcagcatgtctctgcgctggccaggcagttggggaagccagagttgcctagctctacgcacggcgcttccttcatgcctatgccgacaaacggacactcaaggagccctatacctt

SEQ ID NO: 1578 - DNA, 368 bp, Chlorella vulgaris
accaaacgtccgcccacgcgtccgcccacgcgtcagcccacgcgtccgaattattataaaacttagaaaatacattattttttttcaaattttttttttgtacttttccattcatttttattccaaaaaggttgaacataaatttattgcaaaaacgaaatttttgaaaaaagaaatacgtgaatttttgttttttttattttgttttaaaatatacaataaaaaaaacaactataaatttataaattcaagtaaaaaatgaatgtaaaaatcattaaatagagatattttgtaaaaaaatacatacgattgtattcatagaaaactaacagttattgacattttatcaaaaaataaaatgttttgac

SEQ ID NO: 1579 - DNA, 383 bp, Chlorella vulgaris
  unsure (1)..(383): unsure at all n locations
cccacgcgtccggtggccatcctcaaggttggcggcgcgtctgaagtggangtgggcgagaagaaggaccgcatcacagacgcactcaatgcaaccaaggcagcagtcgangagggcatcgtgcccggcggcggcaccgccctcgtgtacgcgtcgcgcacgctggactccatcaaggccaagtgcgagaactttgaccagacggtgggcgtgggcatcatccagaaggccatccgaatgcccgccaagaccattgcagacaatgcaggcgaggagggcgctgtgattgtgggcaagctgctagaagcggccaaggacgacgagacgctgggctacaacgcggccgccggcaagttttagaacatggtggccgcgggcatcat

SEQ ID NO: 1580 - DNA, 52 bp, Chlorella vulgaris
aaaaaaaataaaaaaaaaaaaaaaaaaaaaaaaaaaaaaaaaaaaaaacaaa

SEQ ID NO: 1581 - DNA, 381 bp, Chlorella vulgaris
accacgcgtccgcggacgcgtgggctgacccacatcctgcctgcttgcggtacagatgcggcaagtgaataagggcatcggagttgacaacctacatcacttgaatgacggcctgtggaagacgccagccttggaatgaaaatggcacagccccgtccccatggccttgttgactgcatgctttgctgtgtgctatccagtgcttgataattttccttactgctcttgctacagtatgtcctgaagcctttaggtcggtgctgacaagtgctaaagtatgaataataagctttcatcgtcgttgttatggtaggttacgtgcacctaaaaattgcggcagcgcacttgaagtcctgcatgaaagcctttgttccctgtaaa

SEQ ID NO: 1582 - DNA, 383 bp, Chlorella vulgaris
cggacgcgtgggcagcaactaagtgccaacaagtggtagccaaactcagcgagattaagggaacgaacacccgtaggtttctatagtggtatgcttgcctgtgctgcagaagagtgatcgatagcaaagttgaccagggctagagctgatataggtacccagggaggttgtcctggcattggcatatgatgccgttatcgggtaggcagacttggttgataggtagcacacaacaggtagctgtgcctgatatgccgtcatactgaccccagttttgtgagccgctgctctattgctaccccctttttgacagcaaatgctttctttctccttaccatgtttcatgttcccttcggaatgatttgtaacaatgcagcacatca

SEQ ID NO: 1583 - DNA, 311 bp, Chlorella vulgaris
acggacgcgtgggggcaccggcaatgcctaccccggcggcaagtactttgacttcctgggcctgtcgcgcggcagcgaggagcagctgcggcagtacaagatcaaggaggtcaagaacggccgcctggccatgattgccttccttgggtttgctgcccagtatgccgccaccggcaagggccccatcgacaatctcattgagcacatcaccaccggcggcggtggcatttggagcacccgtggaacccgcagtgctggctagggaagggctgcgctcgggatatagatgatcatgtaacatgttcatgcag

SEQ ID NO: 1584 - DNA, 422 bp, Chlorella vulgaris
cttgtttatgatggcctatatgtggtctgtaagatgatgtacctggtctgacaggacgggcgtttacagactggctgcttgttgtggccgctgtctactgacgctcgagcctgctggggattatagtctagcctgtgcttgagtagcacttggggcagtgggatttgccgtaagcgagccaggtgtactgggatagcattttgctgcataattggctggcatgcgcgtctgagctcccttcctgtgctgtagacgtgcttgataccttggatattgtgcctagactgtcgtgccacctgtcttcaagagaggtttgcactggcaaactccagtgtttttgcaatctctgggcctaatgtcggcagtgaaacggtggttagcacttctcctctccacatgtgcaaagtatgtggccttctgac

SEQ ID NO: 1585 - DNA, 410 bp, Chlorella vulgaris
atacccggccaccggctgccagaagaagctggaggtggacgatgatgggaagctgcgtgccttctttgacaagcgcctttcccaggaggttgagggcgaggccttgggcgaggagttcaggggctacgtgttcaagatcaagggcggccaggacaagcagggcttccccatgaagcagggtgtgctgacctcgggccgcgtgcgcgtgctgatgagccccggcgaccagtgcttccgcggctacggccgccgcaacggcgagcgccgccgcaagtcggtgcgcggctgcatcgtgtcccccgacctctccgtgctcaacctggtcatcgtcaagaagggcgagcaggagctgccggggctgaccgatgaggagaagcccaagatgcgcggccccaagcgcgccgcccgca

SEQ ID NO: 1586 - DNA, 406 bp, Chlorella vulgaris
  unsure (1)..(406): unsure at all n locations
acccacgcgtccgcccacgcgtccgcgcagccttgcctgctgctgagccctcagaggcagccccactcctcactagcacagaaccattggctgctgcctaagggagaggggcctgctacgccccccaggtggccggcggacggctatgaatgacactcttgtacacaccctaggcgctgtangagctgacccatgtcaggccgtcttgggcaaaccttcctaggctgtctggcttgccatttacaggtgtgcactgctccaaagccctgcgcagagtgctctaaacccgacgctttggcacaaacatgccgctagtctttggtgtgacccctttctacacacaacgtcagaaagataggcatgatttcggacatgatcaaaaactgtcgggcttgcaaacttttgt

SEQ ID NO: 1587 - DNA, 380 bp, Chlorella vulgaris
gcgtggagtggtacggccccaacaggcccctgttcctgggcccctacagccccgagcccccgagccacctgaagggtgagttcgctggcgactacggctgggacacctccggcctgtccgccgatcccgagaccttctcccgctacagggagattgaggtgatccatgcccgctgggccatgcttggcgcgctgggctgcgtcgtgcccgagctgcttgaccagaccaaccacgtgccctggttcaaggctggcgcccagatctttgcccccgagggcatccagtacctgggtgtggatggcctgattcaatgcaagaacaatggtgggcacctcattgtccaagttgggcccaagtcccttggggaagggctacgcatc

SEQ ID NO: 1588 - DNA, 438 bp, Chlorella vulgaris
cccacgcgtccgcccacgcgtccgcccacgcgtccgcgaaagagtcaaaggcagacacaccatgcaggtgcaagccctcttcaagaagcttggcggcggtgcccccgctaaggcagccaagaaggccgccggtgcagccaagaaggccgttggcaacgccaagaaggtcgcctctggcaccaccaagggtggctggctgggcactgacagcaacaacatcgacctggacaggtggtacggccctgaccgcgccctgtacctgcccggtggcctgctggaccgctctgaggtgcccagctacctgaacggcagcctgcccggcgactatggctacgacccccttggtctgggcaaggatggcggcctggagaagtaccgcgccaacgagctgctgcacgcccgctgggccatgcttgccgctgctggcgccatcaaccc

SEQ ID NO: 1589 - DNA, 420 bp, Chlorella vulgaris
  unsure (1)..(420): unsure at all n locations
aggacgcgtgggtcgccggcgactacggctgggacactgctggtctgtctgccgatccccaaaccttcgctgcctaccgcgaggttgaggtcatccatgcccgctgggccatgcttggcgccctgggctgcctgacccccgagctgctgcagaacgccggcgtggccagcttcggcgacgctgctgtgtggttcaaggctggtgcctccatcttcggcgatgatggcctgaactacctgggcaacccctccctggtccatgcccagtccatcgtggccaccctggccgttcaagtcatcctcatggctcaggctgaggctttccgtgtgagcggcactgccccctggagcggcgaggagctcgacaccctgtaccccggtgatgcctttgacccccttggcctgnctgacgaccccgaca

SEQ ID NO: 1590 - DNA, 430 bp, Chlorella vulgaris
agctgggcaaggtgcccttgctggctcagatgggggccacgtcacaggggaaacgtcgccaggatttctgctcgcctccctggtctccggcaccatgccctgcttgtagcagcaacggccgcctcgctgcatgacgtcaggactctgcccccttggagttcgagggagccagcctctgaaacagaccggcagcaccacgcccgcttactggaagcctgcgttgaggcagcaaaccagtgtggccttcacctggaacgagcccaagttgagcaccgcctgcagcagctgctcacacttttgccggagttgcggccctggctggatggccttgactatagtctgttagccgcgctgctcatagaccccccagcactgcagcgcaagctcatggagctcaaagccatcttgccaagggctgacgtgggtctgc

SEQ ID NO: 1591 - DNA, 350 bp, Chlorella vulgaris
gacccacacgtccagccagggggcacgcatcgagtgagcggttcaccatggggctgacgttcaccaagctgttcgcgcggctgttcagcaagaacgacatgaggatccttatggtcgggctggacgctgccggtaaaacaacgattttgtacaagcttaagctcggacacatagtgacaactatccccaccattggcttcaatgtgaaaacagtggactacaacaatattaccttcaccgtgtgggacgttggtgggcaggacaagattcggccgctatggcgccactacttccaatacacccaaagcctcatctttgtggtggacaccactgaccttaaccgtattggg

SEQ ID NO: 1592 - DNA, 387 bp, Chlorella vulgaris
agtaaatgatcgttgtcatctgtgaggacctagtatcaattgaaagcgcactaaccttcgaagatgtctgtctccgtggcctcgtgtaggccttttgtgcaggcctgtcggagtgtgcatataccacgcaagcatcgctttgtaccgacagctgccctgtctaaagaagtacgggagctacgcgccgtccagagcacactccttggtgcagcagctcttgcagcaagcctggccctgagtgccagtcccagcatggctgagcccaagctgccgcccttggacaccgaccctaaccggtgtgagcgggcatttgttggcaacactataggacaggccaacgcggtgtcagacaagattctggacctccgtttctgtatgctgggtggg

SEQ ID NO: 1593 - DNA, 231 bp, Chlorella vulgaris
agaaaaaaataagagaaaatcaagataagaggtattacagatttttgaaaggaaggaccttcggatgcttcagtgccatctagacgcatgtatgctcatttcatcttgaatcgtatgctcggacaaatggggtgacgtcaccttcgttggacatttagctcgtctgtctatacatttacttctgcgtcctgtttgggagttcgcacctgttaaccctccgcgtttttcaac

SEQ ID NO: 1594 - DNA, 358 bp, Chlorella vulgaris
actcatgcattgctatgtttgtcttgagcttcgcccgacaaaatgtcgagccaacttgtgtgggagcttgtgaagcacaacaacgcattccttgttaaaggcgttaacggcaccgtgttcagccgggaggctggtaacctgtataagcgcaactcctacaagtattctggcctggccaacttcaactccactgtggatgttgctgccgctaaagatggcggggtgcacgtgtccaagtcccgtggcaagaacgccagcaagcccagcgctgcccgtgctgtgtctgtaatcaagaagaacgctcgccgcaccagctacactgtcggcgctgacgcgcagcacgtgcgccccgacctca

SEQ ID NO: 1595 - DNA, 451 bp, Chlorella vulgaris
  unsure (1)..(451): unsure at all n locations
ggtcctaacaccgggtcagccacgcgtccgaccaagcgtccggcttaggtaaggtggcaaatgtcagccatgacgcctatcagaacattggacaggttctgtatttcgaccacctaaccctccggcctcatagggttgatcgactgggacagccttcagggtcgcaaagccgctgacaggcgaagacccgctgccttatggaagctgcgctggggtgtttgcttggggtggcggtcggcgacgcagcaggggccaccttggagtttgagagccctgttaccgcccccatggttgagcatgccttgacactgccagggggcggctgctgggctgtcgggccaggacagtacacagatgacatggagctcaccctgagcttggccagcggcctgtgtgggcatgcacctgagcanggcttcccgaccgactctgtaactcaacaatacacaac

SEQ ID NO: 1596 - DNA, 411 bp, Chlorella vulgaris
  unsure (1)..(411): unsure at all n locations
accacgcgtccgcgcctgacctcccatctcgtgcggctttcgcctttgaagccggcagcaggtcaccatgggtcgcgtcaggaccaagaccgtcaagaaggcttctcgtgtcattatcgagaagtactataaccgtctcaccatggactttgacaccaacaagaggatttgcgaggaggtggccattattcagtccaagcgcctgaggaacaaaattgctggcttcaccacgcatctgatgaagcgcatccagcgcggcccagtgcgcggcatctccctcaagctgcaggaggaggagcgtgagcgtcgcatggactacatccctgacgagtcggccatccagaccgacgcgattgaggttgacnaagacaccctggagatgctccgcggcatgaacatggccaacctgcc

SEQ ID NO: 1597 - DNA, 414 bp, Chlorella vulgaris
accacgcgtccgcgcctgacctcccatctcgtgcggctttcgcctttgaagccggcagcaggtcaccatgggtcgcgtcaggaccaagaccgtcaagaaggcttctcgtgtcattatcgagaagtactataaccgtctcaccatggactttgacaccaacaacaggatttgcgaggaggtggccattattcagtccaagcgcctgaggaacagaattgctggcttcaccacgcatctgatgaagcgcatccagcgcggcccagtgcgcggcatctccctcaagctgcaggaggaggagcgtgagcgtcgcatggactacatccctgacgagtcggccatccagaccgacgccattgagggttgacacgacaccctggaaatgctccgcggcatgaccatggccaacctgcccgg

SEQ ID NO: 1598 - DNA, 433 bp, Chlorella vulgaris
actccgtcctgggctgcggcctcaggaaggtgtggctggaccccaatgaggtcaatgacatctccatggccaactcgaggcagaatgtgcggaagctagtgaaggatggcttcatcatccgcaagccagagaagatccactcccgtgcccgcgcccgggcgtcagcggaggccaaggctaagggcaggcacaccggctacggtaagcgccgcggtacccgcgaggcgcgcctgcccaccaagatcctctggatccgccgcatgcgcgtgctgcgccgcctgctcaagaagtacagggaatggcaagaagatcgacaagcacctgtacaacaagctttacatgaaggtgaagggtaatgtgtacaagaacaagcgtgtgctcatggaggccatccacaagcagaaggcagagaagattcgcgagaaggcgattg

SEQ ID NO: 1599 - DNA, 240 bp, Chlorella vulgaris
acgcatccgactccgtcttgggctgcggcctcacgaaggtgtggctgtaccccattgaggtcagtgacatctccatgggcatctcgaggcaacatgtgcggtcgctagtgaatgacgggttcatcacccgcagtccagcgaccatcgaatcccgtaccttcgcccgggcgtcagcgctggccaaggctaagggcatgcacacgggctacggtgagcgccgcggcacccgtcaggccacgc

SEQ ID NO: 1600 - DNA, 362 bp, Chlorella vulgaris
acccacgcgtccgcccacgcgtccgctgcgcgtggcggactttgccaaggcgggcgccgacatcatctctgtccatgctgagcagtcgtccaccatccatctccaccgcgtgatcaaccagattcgggacctgggctgcaaggcgggcgtggtgctcaaccctgccacctccctggacaccatcagatatgtgctgccagatgtggacctggtgctgatcatgagcgtcaaccccggctttggaggccagaagttcatcgagtcccaggtgaccaagattcagcagctgaagcagatgtgtaacgaggcgggcaccaaaccctggattgaggtcgacggcggcgtgacccccgacaatgcct

SEQ ID NO: 1601 - DNA, 350 bp, Chlorella vulgaris
cggaagcgtgggcttcaggggccaccacataatggagtatgtccctttgtcttgctctgagcaggccaaggcgtttgccgactgcatgagctacaacagcggcgagatggaccgctgccaggagtacttccaggccatgcagcagtgccgcctgaacctcgcctagtaaaggttgaggctggggacggcgcgctctacgacgctggcggcctggtggttgggctgatgcccttgaggcggaagaatgcaggctgcttgccaaagcggtgcagtggttgctggctggtgcaccctaatatgatggtgaggttcagctggggctcatatagagtacgctgtttcatgcagtt

SEQ ID NO: 1602 - DNA, 434 bp, Chlorella vulgaris
acgacttcaagcagatgaaggagaaggagatcaagaacgcccgcctcgccatggtcgcctttgtgggctttgtcatccaggcgcaggccaccggcaaggggcccctggccaacattgccgaccacgtgtccaaccccttcgcccagaacatcaccaagaacattggcaactgcatgatccccgagtccgtcgacatccagggcctcacactgccgctcttctgcctgtggcccggctcccactgagtgcctagtatgtactgccgctggggagcagtaccattacctggtggtaccgccctgctgcagctcgtcgtttcatttacctaacgagaagaatacaaacacgtttccaagccgctgctcatttagtatgctgttgtcgtaattaggttcaggcttgagcgctgggaaggccatgcgcactgctgtgct

SEQ ID NO: 1603 - DNA, 423 bp, Chlorella vulgaris
acccacgcgtccgcggacgcgtgggctagaactagtggcatcttctggcaggaggaaatcatccccttcttccagcaggtcaagctcagccccgacagcaccaccgtctacgcctgctacctggagctggcagagcaggtgcgcaagggcctgggccacctagacccctacttcaccaagttggcggacggcatggtcgcctggatccactcctggcagcagctcaacgacaaggagcacgcggccaacggcaagatggctttttagcgcgagccttggacgtgagtttctcagtggtggttacgtgtgtatgctcagagagcactctcaagatattctgctccctatttcaatttccagtcaagtatgtacgcttatatgctggtccatccatcatctgttggaacactgtaacctgaatga

SEQ ID NO: 1604 - DNA, 411 bp, Chlorella vulgaris
agctcttgtttagttaggtgcagcaaccatggggcgccgcccagcaaggtgctaccggcaaatcaaggggaagccgtaccccaagtctcgcttcggccgtggtgtgcctgactccaaaatccgcatctacgacgtgggcgcaaagaagtctggcgtcgatgccttcccttactgcgtccacatggtcagctgggagaaggagcacatctcctctgaggctcttgaggcggcccgcattgctgccaacaagtacatggtgaagaatgcgggcaaggacgcgttccacctccgcgtgcgcgtgcaccccttccacgtgctgcgcatcaacaagatgctttcgtgcgccggggctgataggctccagaccggcatgcgcggcgccttcggcaagccctttggcgtggctgcccg

SEQ ID NO: 1605 - DNA, 398 bp, Chlorella vulgaris
  unsure (1)..(398): unsure at all n locations
gggcacccgccaggtgacccgcgcctccgtggagtggtacggccctgacagggccaagttcctgggccccttctctgagggctccacccccagctacctgaagggcgagttcgccggcgactacggctgggacactgctggtctgtctgccgatccccaaaccttcgctgcctaccgcgaggttgaggtcatccatgcccgctgggccatgcttggcgccctgngctgcctgacccccgagctgctgcagaacgccggcgtggccagcttcggcgacgctgctgtgtggttcaaggctggtgcctccatcttcggcgatgatggcctgaactacctgggcaacccctccctggtccatgcccagtccatccttggcaaccctggccgtgcaggtcatc

SEQ ID NO: 1606 - DNA, 355 bp, Chlorella vulgaris
accaagcgtccgcgtcactgtccctgtctaccagtgtaacccatcagcagggattgaatgccaggaacactggtcaggcagaacaacgtggagcccaatcagcacttcatgaacaagtggcaagacaaagtcaagacctggttcaatcagcccgttcgcaaactcccgaggacgaatgcccgctccaagaaggccaagaaggtgttcccccgccccaccgcgggcgctctgaggcccatcatgcactgccagaccgtcaagtataccatgatcaaccacgcgggcctctgcttcacgctggatgagcccaacgacgctgacattccctccaagctatgccccaccattggcattg

SEQ ID NO: 1607 - DNA, 392 bp, Chlorella vulgaris
ctgcttcagccagcctttgcaaaggttcctcgaagtctccacaatggccgccgctatgtgccagacctctgttgcccgggccttcgcccctaaggtggctgcccagaagcgccagcgcgctgttgccgcccaggcctatgttggcaactggctccccggcagcgaccgccccgcctacctggagaagctccctggtgcctacggctttgaccccctgggcctgggcactgagcccaagagcctggagcgctttgtggaggctgaggtgattaacggccgctgggccatgctgggcgttgccggcatgctcggcgtggaggccctgggctacggcgactggtacagcgcacccctctgggccgtgactggcggcaaggcgacctactttggcg

SEQ ID NO: 1608 - DNA, 396 bp, Chlorella vulgaris
gcatggtcacgccgccttgagttgtttggcaatgcaatttggccatatgtggagggacccacgggtgcgaccggcgcagcccagcccgtggtgcagccaaaagaagcagcaaccttcaggcgtgccacacagccatgggcggcgtcaattgaatgctggctttcttaagggctgctggcctgcacacaagggaatggtgctgcaatcactgaatggatggctgcaatggatggcaccaagcccagcaagcaagatcctttgcatagattttgctttggaaaccaggtggattagtgtgcttggggcgcctggtgtcggtgtgtctcgtcactaaggttgtaccgataggggatactcttgcttgggagtgtgcacacttgctcacgtgcggggtac

SEQ ID NO: 1609 - DNA, 144 bp, Chlorella vulgaris
acaaaaatcaaaataaaaaaaaaacaaaaacaaaaaagatttaaatccatacttaattttaatacaaatatacaaacacttctataatatcaaactgtaattcaaattaaagggctcttatttataaaggctctctacctttaa

SEQ ID NO: 1610 - DNA, 407 bp, Chlorella vulgaris
atcagcttgttcggtcttgatcgctgacccgcctgcttgctcgcccttcaaacgatcatggtgcacgaaattgccgacaagagcgcttgggatgcgaaactggatgaggccaaggctgcaggaaagatagtggtagtggacttcacagcggtgtggtgcggtccctgccgaatgatcggcccagagtttgagaagcttagccacgaccctgagtttgccaacctcatctttctgaaggtggacgttgacaaagtggagtctgtggcccagcaatgcaacatcaaggccatgcctaccttcatcgtgttcaaggacggcaagcctgtggaggagattgtgggcgcatccaaggacaagctccttgccctgctcaagaaggcggcggctggcgggcctttcactgcctg

SEQ ID NO: 1611 - DNA, 404 bp, Chlorella vulgaris
agttcgacacaggggacctggggtgcagggtgccccacagcgtgcaaggcagcaacatgggaggcaacattgtcatcacagggagggctaaagacaccattgtgctcacaaacggggagaacattgagccgcagcctttggaggacatggtgcaagtctcgccttacatcaagttctgtgtgctgtttgggcagcgggcgctgggagccctcatcgtgcccgacctggaggccctggagggcagcctggacaaggacgacgagggcaatgtcagccgggaccacctgcgctctgttgtgcacgcggagatcagcaaggcgctggcggcgcggcccagtcgggagcgcatcaccgcctttgagctggtggaggaggagttcagtgtggagaacggtactctgact

SEQ ID NO: 1612 - DNA, 392 bp, Chlorella vulgaris
  unsure (1)..(392): unsure at all n locations
gggtcagccacgcgtccgaccgcatgtatgctcaagcgttcacgctggcggcgcttgggggcgttgctgccgttgagctgtactctcagtcgcagcagaaggcgaatggacagcaacaggagtaggccacacggcattggcgtttcggctgctttccatacgccatgtactagcccctgtattgaactggtggtgttctatggcgcggcaaaccaatattcgccggtgtactgccattctttcccagacagtagaccctgtcggtactttgtgtatgtttccgtgcangcttgatatatttgcgcctgcaagcattgtttgctggctcacgtcttgctggcgagtcggctaaggtctttctatgtatgaggccagcttccgtgtctacaaca

SEQ ID NO: 1613 - DNA, 384 bp, Chlorella vulgaris
gagcctgacatctacaacgccattaagtttggcaccatccttgagaacgtggtgtttgatgaggagacacgctcagtggactacgactccaatcgcatcacggagaacacgcgcgccagctaccccatcgagttcattgagaacgccaagatcccctgcatcggcggccaccccaagaacatcatcatgctgtgctgcgacgcgtttggcgtgctgccgcccgtcagcaagctgagcaaggagcaggccatgtactacttcatcagcgggtacaccgccaaggtggcgggtactgaggtgggcgtgacggaacccgaaggcacattccccgcctgctttggctccgccttcctcatgtggcaccccaccaagttcgccagcatg

SEQ ID NO: 1614 - DNA, 413 bp, Chlorella vulgaris
ggcaggcacaccggctacggtaagcgccgcggtacccgcgaggcgcgcctgcccaccaagatcctctggatccgccgcatgcgcgtgctgcgccgcctgctcaagaagtacagggatggcaagaagatcgacaagcacctgtaccacgagctttacatgaaggtgaagggtaatgtgtacaagaacaagcgtgtgctcatggaggccatccacaagcagaaggcagagaagattcgcgagaaggcgattgtggaccagctggaggcgcgccgcgccaagaacaagcaggcacgcgcccgcaaggccgcccgcagggaggagcgcttcgcaacagggcagatcggcactgccgccaccgagtccaagaagtaaatgagccacccttggtgttggctgactgccggctggctggg

SEQ ID NO: 1615 - DNA, 455 bp, Chlorella vulgaris
ggtcgaccacgcgtccgaggccgtgctgctccccagaattgtgcctccatgggcctggttgagggctaccgcttgaacggcggccccgctggcaagggccttgaccccctgtaccccggcaaggcctttgaccccctgggcctggccaacaaccccaacagcttcgctaagctcaaggtcaaggagatcaagaacggccgcctggccatggtgtccatgcttggctttggcgtgcagggcctgctcaccggcaagggccccctgaagaacctggctgaccacctggctgaccccaccgtgaacaacggctttgccgtggccaccaagttcacccccggcaactgagctggttgtcttgacggacgtttggctgtgctgcttgacaggctggaggtcagcattactatgctggccttgtcttgagaagaaaatccttgtgtaactagctaaccatc

SEQ ID NO: 1616 - DNA, 421 bp, Chlorella vulgaris
agcctgcgcaaggctgtgcccacccagggcaagggcacccgccaggtgacccgcgcctccgtggagtggtacggccctgacagggccaagttcctgggccccttctctgagggctccacccccagctacctgaagggcgagttcgccggcgactacggctgggacactgctggtctgtctgccgatccccaaaccttcgctgcctaccgcgaggttgaggtcatccatgcccgctgggccatgcttggcgccctgggctgcctgacccccgagctgctgcagaacgccggcgtggccagcttcggcgacgctgctgtgtggttcaaggctggtgcctccatcttcggcgatgatggcctgaactacctgggcaacccctccctggtccatgcccagtccatcgtggccaacctgcccgtgc

SEQ ID NO: 1617 - DNA, 342 bp, Chlorella vulgaris
  unsure (1)..(342): unsure at all n locations
cggacgcgtgggcggacgcgtgggcggacgcgtgggcaaccccagacctgtttcctggcgatgaacgtgtgtttcttatcaacaacagatattgcaggcatcgaccgccttgcgcaagctgcgattgaaggcagccggcgcaggctggggttgactgccattgcaacggtctcttcaggtanggggttggatcctctgacgctttgttttgcaaggggttcaaagcgttctgcatggggccttacactgtgctgcagtcctcggcccagcgttaagtaatttatgtggggcctggcagcggcgacagtatggcaggcggagccttccctgaaagtgggtgtc

SEQ ID NO: 1618 - DNA, 152 bp, Chlorella vulgaris
aggacgcttgcggcgtgttgttcgcgcacgtgtagtgtgagccgcccattgttgggcgggcactctggacccgtctggataggctcaactttttgcgattttggctggaggtagagctgctatacgaagagtatgcttgaagggcaagtgtg

SEQ ID NO: 1619 - DNA, 385 bp, Chlorella vulgaris
ctctcccgttaactccccaactcgggtcgtgatcagccgaggatccatggcgagtgaggctgtgaaccccaaggcctaccccctggccgatgcgcagctgacgaacaccatcatggacatcgtccagcaggccaccaactataagcagcttaagaagggtgctaacgaggccaccaagactcttaaccgtggtatcagcgaggtggttatcatggctgccgacactgagcccattgagattctgctgcacctgcccctcctggctgaggacaagaacgtgccctatgttttcgtgccctcaaaggccgccctgggccgcgcatgtggcgtgtcacgcccggtcatagcgtgcagcgtcaccacaaacgagggcagccagctcaag

SEQ ID NO: 1620 - DNA, 415 bp, Chlorella vulgaris
accacgcgtccggcacaagctcaagcgccttgtagcttctcccaactcctatttcatggacgtcaagtgccaggggtgcttcaccatcacgaccgtgttcagccactcccagacggtggtggtgtgccccagctgcaacaccgtgctgtgcgtgcccaccggcggcaaggcccgcctcacagagggctgctccttccgcaggaagggcgattagtcaggggaggcgctacgctggcatgtggtctcaagaaagtgcgccgccgcggcttgaggactcttgccagcgggacagcgcggcctatcaggacaggaacaggaagggagcgaagaagatttgcaaagcatggaaagagggttgttagggattgggttgcagcgccccgcccagtcaggatactcttcagccacccctgta

SEQ ID NO: 1621 - DNA, 437 bp, Chlorella vulgaris
acccacgcgtccgcccacgcgtccggactccagccagtggcctaacatggttaacaacgcatcctggtacaacggggtgtccaaagacctgacgggccgattggggcacgggacatttgtagcgggcgcgctgggggctgtgggcaacaacaagtatggcgttacgggggcagcgtggaaggtgaacattgtgggctgtaaagtctttgacctcggcaacgccgatgtgtcgaccgtgctgccctgcttggactattgccgcctgcggaagagcagggtgatggtggggtcctggggccaggatgagcccagcctaatattgcagcaggagattgccagagcactgagggacggtgcactttttgttacggcggcagggaattacaaccgcgataatgataggttgccgttttacccttcaaaatacacgcaaacaa

SEQ ID NO: 1622 - DNA, 360 bp, Chlorella vulgaris
accaaaatcaaggcccatgagctgcggaccaagagcaaggccgacttgctggcccagctgaaggaccttaagcaggagctgggtgcgctgcgtgtcgccaaggtcactggcggtgcccccaacaagctctccaagatcaaggtggtgcggaagtccatcgcccgcgtgttgaccgtggtcaaccagaccacccgcagcaagctcagggaggaggttgccggcaagaagtacgtgcccctggacctgcgcgtgaagaagacccgcgccatgcgcagggcgcttaccaagcatgagaggaccgtccggactgagaagcagaagaagaaggacgcagccttcccccgccggaagttcgctgtc

SEQ ID NO: 1623 - DNA, 395 bp, Chlorella vulgaris
  unsure (1)..(395): unsure at all n locations
cgggtccagccacgcgtccgaccccattggcttcttgtacgccggcacgctctggctggggaatgctgcctacctgtacctctcagtgtcctttatccaaatgctcaaggcgatgatgcctgttgcagtgtttgcggtgggctgtggatttggcacggagaagtaccacacatcaacactcttcaacatgctgctgatcagcgtcggagtgggtgtggcctcttatggggagctgaactttgtgctcattggggttctgctccagatgctttccattggcacanagtccacccgccttacgctggtgcagattctctttcagcgccgccggcctgaacctgaacccggtgacgacgctgttccaaaattgcgccctgctgctttttgtttcctgc

SEQ ID NO: 1624 - DNA, 429 bp, Chlorella vulgaris
gccggtgggaagggcttgtcttccgcaagccaaaatgccgtccataggcttttaccgcaactatggcaagaccttcaagaagccccggcgccccttcgagaaggagcggctggatgccgagctgaagaccgtgggcgagtacggcctgcgcaacaagcgcgagctctggcgtgtgcagatggtgctgtccaagctgcgctccagggcccggtccctgctgaccctggacgagaaggaccccaagcgcctttttgagggtgaggccctcatgcgccgcatgtaccgctacggcttcctggacgagacccagaacaagctcgattacgtgctggcgctcaaccctaccgacgtgctggagcgccgcctgcagaccctggtgttcaagctgggccttgccaagagcatccaccacgcgcgcgtgctcatccg

SEQ ID NO: 1625 - DNA, 390 bp, Chlorella vulgaris
gcacatctcgccctacaagcaaacccttaactcctaggtgcagcgccgacactaccgtactcccatgtccggcaggcccgaccccatcaccaaggctgcaaacgccgctagccctggagttccaaggagcataagagcaaggaccgggcagaccacagatccggtacctgagggtttccaggagtcctcgtcaccaacgcaccacctgccagtggagcctgctgagcacgatgtggaccgcaccaagttgaaggcggcggaggagatgggggtgagcgaccagcagctggcttccttcaagggcaattctgacatggagacggaggagaaggccaaggagctggtgcaccgtaacatgactgaggagatgaggcaccgcgccaacaaggc

SEQ ID NO: 1626 - DNA, 421 bp, Chlorella vulgaris
aagaaaagctgcagaagatggccgggagcgtgcggacgggcgggaaggggtctgtgcggaggaagaagaaggcggtgcacaagaccacctccaccgacgacaagcgcctgcagaacacgctcaagcgccttggggtgaacaccatcccgggcattgaggaggtgctgctgctgaacaacgacggcaccgcgctgcagttcaacaaccccaaggtgcaggcgtccatcgccgccaacacctatgttgtctccggccccgcgcagcagaagcgcgcccaggacgtgatggcgcagatgcttgcgggcatgggcggcatgccgggcatggcgtccatgatggcgcaaatgggcgctggcggcgccggcggcttccccgccttcaaccctgcgggcgccgcagaggagccgcttgatgatgatga

SEQ ID NO: 1627 - DNA, 391 bp, Chlorella vulgaris
gaacgcactcctcggagtcactttgtgcctagacgcgtcctatacttcctttgttgccataggattgaggtttagctactggctatgccaattgtcaacagttagctggcagccggctgatcgcggcttcagcttcaataacaccttttccggggcgcgagcaagcagtggttgccacatccgggcggacataggctagcaaacatggcaagaactcccacagcagttgccatgcgccgcatacaaagcgagctgaacgattggttgcaacacccgcccgaaggctgccggctagtgcagtgcgagcctgttaccaactgggtcatagagatgctgggcccggaatcttcgccttgcgagagggcgttatataaagggcaggtcttccact

SEQ ID NO: 1628 - DNA, 437 bp, Chlorella vulgaris
gcacgcgtccaggtggagaccctgcccatcagcagccatgggtatctcccgcgactcgcttcataagcgccgggcgacgggaggcaagcagaaggcttggcgtaagaagaggaagtatgagctcggccgccagcccgccatgaccaagctgtcctccaacgtgacagtgaggcgtgtgcgcgtgcgcggaggcaactctaagttcagggcgctgcgcctcgactcgggcaacttctcctggggctccgaggccgtgacccgcaagacccgtatcctggatgtgtcttacaacgcctccaacaacgagctggtgcgcacccagaccctggtcaagaacgccatcatccaggtggacgcaacccccttcaagcagtggtaccaggtgcactacggccaggaggtcggcatcaagaagaaggccgccgcaaccgccgcag

SEQ ID NO: 1629 - DNA, 325 bp, Chlorella vulgaris
agggctgtggaggcgttttatatataaaaatgcctcccaaatttgatcccaactccattgtggaggtgtacgtgcgtgccaccggcggtgaggtcggtgccgcatcctccctcgcgcccaagattggtcccctgggtctctcccccaagaaggttggtgaggacattgccaaggagacgtccaaggagtggaagggtctgcgcgtgaccgtcaagctgacggtgcagaaccggcaggccaaggtgaccgtcatcccctccgccgcggcgctggtcatcaaggcgctcaaggagccgcccagggacaggaagaaggagaagaacat

SEQ ID NO: 1630 - DNA, 268 bp, Chlorella vulgaris
aatgaatgtctcgcttgctcgctctcttgctcggaggcattgctagtgagggaccagggtgggtgagggggcggcccgttcccttgcgcaccctgcgacgctgtttatgcttttcatggctgtacagaggcacttggcagttcctacggcacgcattgattggtgttcaaattggctgggagccggtactagggcgcacacatattctgaggagctgggttttagtgagagaccgttggtcggccgagtgtctggtctccgcgcatgc

SEQ ID NO: 1631 - DNA, 330 bp, Chlorella vulgaris
cgtaccagtctagagttctcgggtcaagcgtccgactgtaagctacagtttgagggagcatcaccatgccggcgggacagggctacagggcccgcacgaggtatatgttccaacgccccttccggggcaagggatacattcctctctccacttacctgaccaactacaaggtcggcgagtatgtggacgtcaaggttaacggcgcagtgcacaagggcatgccccacaagtactaccatggcaagactggccgcgtgtggaacgtgaccaagcgggcagttggcgttgagatcagcaagaaggtgaacgggcggatcatcaacaagcgca

SEQ ID NO: 1632 - DNA, 420 bp, Chlorella vulgaris
cccacgcgtccgccagggcaatcactatgcaggcaaccatgatgaagaccttcggcgccagcctgcgcaaggctgtgcccacccagggcaagggcacccgccaggtgacccgcgcctccgtggagtggtacggccctgacagggccaagttcctgggccccttctctgagggctccacccccagctacctgaagggcgagttcgccggcgactacggctgggacactgctggtctgtctgccgatccccaaaccttcgctgcctaccgcgaggttgaggtcatccatgcccgctgggccatgcttggcgccctgggctgcctgacccccgagctgctgcagaacgccggcgtggccagcttcggcgacgctgctgtgtgggtcaaagctggtgcctccatcttcggcgatgatggcctga

SEQ ID NO: 1633 - DNA, 337 bp, Chlorella vulgaris
attattcttctgttattgtatcattatgcatgtatttatgtttattaccttctgtgccacctgcgcatggctgtgcccacccagggcaagggcatccgccaggtgacccgcgcctccgtggagtggtacggccctgacagggccaagttcctgggccccttctctgagggctccacccccagctacctgaagggcgaattcgccggcgactacggctgggacactgctggtctgtctgccgattcccacaccttcgctgcctagcgcgaggttgaggtcatccatgaacgctgggccatgcttggccccctgcgctgcctgacccccgagctgctgc

SEQ ID NO: 1634 - DNA, 411 bp, Chlorella vulgaris
  unsure (1)..(411): unsure at all n locations
gctacagtttgagggagcatcaccatgccggcgggacagggctacagggcccgcacgaggtatatgttccaacgccccttccggggcaagggatacattcctctctccacttacctgaccaactacaaggtcggcgagtatgtggacgtcaaggttaacggcgcagtgcacaagggcatgccccacaagtactaccatggcaagactggccgcgtgtggaacgtgaccaagcgggcagttggcgttgagatcagcangaaggtgaacgggcggatcatcaacaagcgcatccacgtgcgcattgagcacgtgaggcccagccgctgccgcgaggagttcctgcaaaggtgcaaggagaacgatgccaagaagcacgcggccaaggtggcangcgagccccacnctggtgac

SEQ ID NO: 1635 - DNA, 381 bp, Chlorella vulgaris
gccccgggaagagcttggaactgtggcgcaagctcttcccgcgagcaagaatatccttcatagagtctgaagtggagtgtgcggagaagtacaagcaaagcgttgagcgagaagcaggtggcacgctctacatgggggaccataaagatgccaagcttctggccaatattgtccctgatgcccaacaggcaaggcaatacgataacagcattgatgatggcggtcacaacccaacggtgcagctaatccccctgcaaggcttgtggccggcgctcaagtctggacgggcatatgtggaggatgacgtacatcccacgtacttccgcggagacacttttcaaggcttctacaatgctacagggcccaccttcatgggctggg

SEQ ID NO: 1636 - DNA, 346 bp, Chlorella vulgaris
cccacgcgtccgctcaagaaggcgctggctcacgacggcctcgcacgcgggctgcacgaggcctgcagggccattgagcgcggccaggcgcagctgtgcatcctcgccgacgactgcaaccagcccgactacaacaagctgattgaggccctgtgcgccgagcagagcgtcaacctcattgccgtgcccgaccccaagaccctgggccagtgggcaggcctgtgcaagattgacagccagggcgatgcgcgcaacgtggtcgggtgctcgtgcaccgtggtcaccgactacggcgaggagactgacggcctggcggtgctgcaggagttactgaagagccgctgag

SEQ ID NO: 1637 - DNA, 380 bp, Chlorella vulgaris
gttaaggagatcaagaacggccgcctggccatggtgtccatgcttggctttggcgtgcagggcctgctcaccggcaagggccccctggagaacctggctgaccacctggctgaccccaccgtgaacaacggctttgccgtggccaccaagttcaaccccgggaactgagctctagaacctggctccgcagcagtgatttgaggcatgcccaaacccatgagccgctccacaaacttgtgtaccctgttgtaacctgtccgcgaaaggccctggaactgcaattttcctggctttgattttgctgcccctttgctttgccagttcattgggctggaatagtccacgctctattcagtttattggaaatgaaggacgccttg

SEQ ID NO: 1638 - DNA, 408 bp, Chlorella vulgaris
gtggaccctcggcagcatctgcagcagccaatccggatagcagcgccgacgtgtcattaccggacggcgccaccgagcatggggagggcaggggggaggaggacggagctgctgccaccagcggcttgctaggagacgccgactcccacatcgccaacaagcgccctagctaccagttcttcctcgctgcgcatgtgacggacttccccgacgtggcccagtaccggcgcgtgcgcctgctggcccgccggtggaggagcatgagcccagaggagaagcagccctttgcccagaaggaggtggaagacgggcaccgcgcggatatgcagcgggcagggttcatgccccccggcgtggactgggacaacctgccggcccccgcgcggcacaagtggctggccgactggc

SEQ ID NO: 1639 - DNA, 416 bp, Chlorella vulgaris
gtggaatcccccgtcgacaacaggtccaaggttcacaagatgcagaccctctctgcccgtttcggcgtccgcgcccctgtctcccggggcacccgccaggtgacccgcgcctccgtggagtggtacggccccgaccgcgccaagttcctgggccccttcaccaaccccccttcctacctgaagggtgagttcgctggcgactacggctgggacacctctggcctgtccgccgatcccgagaccttctcccgctacagggaggttgaggtgatccatgcccggtgggccatgcttggcgcccttggctgcgtcgtgcccgagctgctggaccgcaacggcaccgtcaactttggcgagaacgccgtgtggttcaaggccggtgccgccatcttcggcgatcacgggctgaactacct

SEQ ID NO: 1640 - DNA, 321 bp, Chlorella vulgaris
acgcgtccgccacgatgagcgtctgcaggagctgatggactctctgcgggggcggttcaaggcggcggtggccatgctggggctgagcgaagcgctgctggcgcccgaccagcagcgccccaccatgcagttctgaccgggggctggggctcctgttgtccacgcttccaatggttccaggactgcagcagtccgtgggcgagtgcccagacggcgcccaacacagtgtgctagggcatctgctgagggctgggagggcgtggttgcaccgttgggttgatgccgggtcagttgagttttgcttaggtgatctatgttggc

SEQ ID NO: 1641 - DNA, 387 bp, Chlorella vulgaris
cgcgtccgcataggcgttcttggcaccatggctgcgaagtcatgcacgatcaggacacgaaagttcatgaccaaccgcctgctgcagcggaggcagtttatccttgatgtgctgcaccctggccgtgccaatgtctccaagactgagctgcgcgagaagctgtccaagatgtacgacgtcaaggactccaactgcgtgtttgtctttggcctgaagacccagtttggtggcggcaagtccacagggtttggcctcatctacgacaacgtccagggggccaagcagttcgagcccaggtacaggctcatcaggaacggtctggcgcagccggtgcagaagtcgcgcaagcagcagaaggagcgcaggaaccggaccaagaccatccgc

SEQ ID NO: 1642 - DNA, 381 bp, Chlorella vulgaris
cggacgcgtgggcgaagcactggatgctcgacaagcttgggggcatctttgcccccaagccgagcgcgggcccccacaagacccgggagtgcttgccgctcatcctgctgctgaggaacaggctcaagtacgctctgacgggcaaggaggtgacgagcatcctcatgcagcgcctggtagaggttgaccgcaaggtgcgcactgacaagacctaccccgtgggcttcatggacgtggtcaccatccccaagaccgacgagcacttccgcctggtctacgactgcaagggccgctttgtggtgcaccgcatcagcaaggaggaggcggcgtacaagctgtgcaaggtccgccgcgtgcagtttggcaagggcggcgtgccct

SEQ ID NO: 1643 - DNA, 211 bp, Chlorella vulgaris
gggccactcactggatgctcgacaagcttgggggcatctttgcccccaagccgagcgcgggcccccagaggacccgggagtgcttgccgctcatcctgctgctgaggaacaggctcaagtaggctctgactggcaaggaggtgacgagcatcctcatgcagcgcctggtacaggttgaccgcagggtgcgcactgacaagacctaccccgt

SEQ ID NO: 1644 - DNA, 404 bp, Chlorella vulgaris
  unsure (1)..(404): unsure at all n locations
cccacgcgtccggcacaagctcaagcgccttgtagcttctcccaactcctatttcatggacgtcaagtgccaggggtgcttcaccatcacgaccgtgttcagccactcccagacggtggtggtgtgccccagctgcaacaccgtgctgtgcgtgcccaccggcggcaaggcccgcctcacagagggctgctccttccgcaggaagggcgattagtcaggggaggcgctacgctggcatgtggtctcaagaaagtgcgccgccgcggcttgaggactcttgccagcgggacagcgcggcctatcaggacagggacaggaatggagcganaaagatttgcaaagcatggaaagagggttgttaggaattgggttgcagcgccccgcccagtcaggatactcttcag

SEQ ID NO: 1645 - DNA, 395 bp, Chlorella vulgaris
gccaagtggaaatacttctgacccataaacattactagttgacttctacaggcagcctgcctactttatggcgctacatactcaattgcggcctagctgagcgctagtagtcatgaagcgtcttcttgtgattacgactgggggcactatctttcagcgcgcagcccaggatggagtcatgacgctgcaagtcacggcagctgagctgctgcaaaacatccaagaagagttgggcgaccaatacgggtttgagctccttgatctgcaagtgaggagtggcgcagagctgacgtgggacacgatcttcagggcacgagatgctgtgcttcagaagctgcagagcgcggctgcttttctgcttatcaccggtactgacaccatggaggagtttgcct

SEQ ID NO: 1646 - DNA, 422 bp, Chlorella vulgaris
cggacgcgtgggtttttttttttttttttacaggaacggcttacagtgaggtttcttctcaatagtcgcaacctgtggggagacgcccgtggagggggctagcacaaaacaaacaaaactgggcggcatggcccgcaatgagtcccaccctcctctcatcccccgataggattcccacactcgcgctgcaagcatacccctcggctagccgctctagctgcagccaaaattgcaaaaagtgagggtcatcctgccggtcccggctgccagcccacccatgggaggccgccagtgcacttgcccgagcaacacgcggcaggccgccctagccacgtcgctttctcctccttccctcctcctcctcctcctcctccgctgcggcacggcactccccttcaacgccgggtggtgtacttggtggc

SEQ ID NO: 1647 - DNA, 374 bp, Chlorella vulgaris
  unsure (1)..(374): unsure at all n locations
cccacgcgtccgcccacgcgtccgcccacgcgtccggctccaggctgcaggtggggaaggacggcacccctttacttgggcatggcagcaattgcgactctgcactccgaggtggcccccgtcaagcagagggactgaacccctcctttccttgcctgtgatgggggagccgcaggagcggangaggggggtgtgcaaatggtttaacgcccagaaaggctttggcttcattacactttaagatactgatcacgaggtttttgtccagcagagcaacatagataccactggctataggagcttacaacaaggggaggaggtcgagtttgacctgctggtgggtgaggaccgcaagcgcaaagcctttcatgtga

SEQ ID NO: 1648 - DNA, 337 bp, Chlorella vulgaris
cacacgcgtccgcggacgcgtgggcggacgcgtggggcagcaaccatggggcgccgcccagcaaggtgctaccggcaaggcaaggggaagccgtaccccaagtctcgcttctgccgtggtgtgcctgagtcgaaaatccgcatcgacgacgtgggcgcaaagaagtctggcgtcgatgcctgcgctgacggcgtccacatggtcaggtgggagaaggagcacgtcgcctctgaggctgttcgggcggcccgcagtgcggccaacgaggtgatggtgaagaatgcgggcagggacgcgttccacctccgcgtgcgcgtgcaccccttcgaggtgctgc

SEQ ID NO: 1649 - DNA, 351 bp, Chlorella vulgaris
cggacgcgtgggcgccaccaagttcaccccctgaattcagccctgaattttgagggaaatcccctggctgctgctagttcctcgttgttctagctcttggttggttgccggtgtgtcgctgttgtgtgaaggggagaggcgtgaccccttggttgtctactggcagcagcagcagcacccagcagctggacggtcgtattgagatgtgtgtgacgcggcaaaattcgtaacgcacgaggaaccgagaagagcacctttaattccccctgctggttggagttttgctgcatttgcactgtacactggcgggctgtatgcgcggtggcccatttgcttggctgcgtgtcctct

SEQ ID NO: 1650 - DNA, 389 bp, Chlorella vulgaris
gtccaagccccttcagcaaaagatccacgatgcagaccgcctttgtccgctccggcctccgtgccgccgtccccaccgctggcaagggcacccgccaggtgacccgcgcctctgtggagtggtacggccctgaccgcgccaagttcctgggtcccttcaccaaccccccctcttacctgaagggtgagttcgctggcgactacggctgggacacctctggcctgtccgctgatcccgagaccttctcccgctacagggaggttgaggtgatccatgcccggtgggccatgcttggcgccctgggctgcgtcgtgcccgagctgctggaccgcaacggcaccgtcaactttggcgagaacgccgtgtggttcaaggctggtgccgccatc

SEQ ID NO: 1651 - DNA, 417 bp, Chlorella vulgaris
gtggaatcccccgtcgacaacaggtccaaggttcacaagatgcagaccctctctgcccgtttcggcgtccgcgcccctgtctcccggggcacccgccaggtgacccgcgcctccgtggagtggtacggccccgaccgcgccaagttcctgggccccttcaccaaccccccttcctacctgaagggtgagttcgctggcgactacggctgggacacctctggcctgtccgccgatcccgagaccttctcccgctacagggaggttgaggtgatccatgcccggtgggccatgcttggcgcccttggctgcgtcgtgcccgagctgctggaccgcaacggcaccgtcaactttggcgagaacgccgtgtggttcaaggccggtgccgccatcttcggcgatgacgggctgaactacctg

SEQ ID NO: 1652 - DNA, 447 bp, Chlorella vulgaris
  unsure (1)..(447): unsure at all n locations
gggcagcaatttcacatcgtgcggtggtgctgccagcggggtttctgaaactcgtagctgtgccatgttcgtgttctttgtcttggacagcttgtcatttggattctcaatggggtgtgtcatcttgattgtagtcttgtcaatgcctcggataccatacaaggacgacgaagtggaagcgggcaggttttggcttctcctcttcacgacttggttgttgttatatctggctgttgtcacgggagtgggcgcttttgcagcatccggtgtggccgtgtacaacgagttgcaagtagttttagcaccactagggcctggtgtgctgctgatctttttagggctgctaagcttctaccggcgcttttatggcatcttcgctgggcggaaagctgtgtctcgaggggtgngcacccttttctccctaagagatggtgctctgcgggcagc

SEQ ID NO: 1653 - DNA, 408 bp, Chlorella vulgaris
aaaaaaaaaaaaaaaaaaaaaaaaaaaaaaaaaaaaaaaaaaaaaaaaaaaaaaaaaaaaaaaaaaaaaaaaaaaacaaaaaaaaaaaaaaaaaaaaaaacaaaaaaaaaaaaaaaaaaaaggaaaaggggccgcccccctaaaggttcaaagcttactaacccttcaatgaaactccatacctcttcaaacttgcccccaattcccatcccatgggccttcattttaaaactctggaaatgggaaaaacccgccctttacaaacttaatcccctttggcacaatctcccccttccgccatcgggcttaaaagcaaaaaggccctaccctttccccttcccaaacattcccccaccctaaatggaaaacggaaccccccctgtaacggcccattacccccggcggttt

SEQ ID NO: 1654 - DNA, 422 bp, Chlorella vulgaris
  unsure (1)..(422): unsure at all n locations
gggacctcaggctcgtggtgctgagagctgccacggacgtgacggtggacagagccagtgtgagggcagccggggagcccgacccagggggctgcttcttcaacgtgtgctgtaccggctgtggctcggccctgggccggctgtacaccgaggcggcggcagggctggagtgcttgctcaacaacttctcattcatagccagcaagtgcaccagctacgagctgggcacttctgagatcagggtggccagcgccacggaggcgggcgatgcgggggcagcttcagccgccacccctgccggcacggcccgggcactggctggtgccgaggcggtggtggctgagctggcagccagggtggagcttctggaggcggagctgactaagatgcanggcatggtgctgctgcacgaagcgcagctg

SEQ ID NO: 1655 - DNA, 381 bp, Chlorella vulgaris
aaaggggcccgctgtcaggggcgctaggggcgttgggtggtccctgttggtgcgtagccggcaggggttcgtgtgcctgggtggagttcaggcagacctgcaaggcactgctctactggctgcctggttagccggtcccatgttgtttggtggaccattcccgagaagaactttcaaacgcctgcctcttatgttcccgcatatgatgctcccctggccagagggcgtcacgatcaatgggcagcaacgcccatgtacccccctgcagcccagagatgacaggttgaacgcatgcccgcgctaccgctgtgccctccctgtttcatgattggcagacagctgcacttgggatacgtgaacactgtagcaacaattttgctg

SEQ ID NO: 1656 - DNA, 336 bp, Chlorella vulgaris
  unsure (1)..(336): unsure at all n locations
acacatgccttgctgttacacacgcttgttcataaggtcctggcccaaacgcccagccgccgacaatgacccaggttgacctacaggcctgncagggaggctgcctcactgatgcagctcctcagaaacgaagcttggagaagaaccacctgttcttgccgctcttgaacttctcctcaaacaggcccttggctgccttgcgtgcctcctccttcttggtggacttgtcaatcacctgagcggagacagaacccttgagctccacatccacggtgtaacgggtgggcatcatgtgctggtacttcacggccttgacaaacgtcttgacgctgctgc

SEQ ID NO: 1657 - DNA, 350 bp, Chlorella vulgaris
gcaagatggcgcggggcccaaagaaacatctgaacagattgaatgccccgaagcactggatgctcgacaagcttgggggcatcggtgcccccaagccgaccgcgggcccccacaagacccgggagtgcttgccgctcatcctgctgctgaggaacaggctcaagtacgctctgacgggcaaggacgtgacgagcatcctcatgcagcgcctggtacacgttgaccgcaaggtgcgcactgacacaacctaccccgtgggcttcacggacgtgctcaccatccccaataccgacgagcacttccgcctggtctacgactgcaatggccgctttgtggtgcaccgcatcagc

SEQ ID NO: 1658 - DNA, 347 bp, Chlorella vulgaris
gcaaggtgtaggtgcagtcactgctggcactactcacctccctcatgccaactttgaacctgaagcaagaccacagcattgggctgagtgaggccgggcaccggctgcagtatcatgagaagggcatgagcggcgaccctgctagcctcgacatggacgctgacgtgaatctgcacatacgcagcgttgtcccatattgcggtgccaacattgttgtggtgcatgacctggtagaggtgccgtcagactaggggcgacatgcggcattcgaccagccacccggcccaccgctgccttcagacgatgtgcccgtttgatgattcacatagagctagggtccagtccca

SEQ ID NO: 1659 - DNA, 378 bp, Chlorella vulgaris
cggacgcgtgggcgcaattcttttctctcattgcgttgagccctactgttcgcttccctcccactgctgttccaaggctagtcaccatgaacaagactagcgccgtcgcaaccgctgttgcttgcgccgcagctggcgtggcttcggcttattattttaataaatatggtcgcaagaccttcagccagcttgcaacatatatccaagaccatatgcccaagaccgcaaaggcggcatgaggcctgcatggcagaggcggggttggtttggggagactgcactaagaaactgaaggcttgctctgcgttgtttgaccgtactacagtataggtgtatgcacactgtttgtgacaagatagccttgctggagattgacca

SEQ ID NO: 1660 - DNA, 228 bp, Chlorella vulgaris
gtccgcacacgcatccggcttaggtaacgtggcagatgtcagccatgacgcctatcagaacattggacaagttctgtatttcgaccacggaagcctccggcctcataaggttgatcgactgggacagccttcagggtcgcagagccggtgacaggcaaggacccgcgtaccttatggaagctgcgctgcggtgtttgcgtggggtggcggtccgcgacgcagcagggg

SEQ ID NO: 1661 - DNA, 445 bp, Chlorella vulgaris
ggccgacccacacgtccagccggggggcaggcagcgagtgagcggttcaccatggggctgacgttcaccaagctgttcgcgcggctgttcagcaagaaggagatgaggatccttatggtcgggctggacgctgccggtaaaacaacgattttgtataagcttaagctcggagagatagtgacaaccatccccaccattggcttcaatgtggagacagtggagtacaagaatattagcttcaccgtgtgggacgttggtgggcaggacaagattcggccgctatggcgccactacttccaaaacacccagggcctcatctttgtggtggacagcaatgaccgtgaccgtattggggaggcgcgggatgagctgcatcgcatgctaaacgaggacgagctccgcgacgcggtgctgctggtgtttgccaacaagcaagatctgccca

SEQ ID NO: 1662 - DNA, 390 bp, Chlorella vulgaris
cccacgcgtccggcggcggctggctagggccgccaagcacgtccctggtctagtttcgcccgccacaaggcatcctgggtgacaacgtcaaggttgtgcgcgagaagaccaagatcacggtgaccagcgagattgccatgagcaagcgctacctcaagtacctcaccaagaagtacctgaagaagcacaacgtgcgtgactggctgcgtgtgattgcgtccaacaaggaccgcaatgtatacgagctgcgctacttcaacatctccgagcagggtgaggacgaggatgaggagtgaatatggccgtccgagtggatctccgacaagtgctggagttgtggtgctgcggatgctggttgggctctctgtaacaccagggaagaggaaaaac

SEQ ID NO: 1663 - DNA, 416 bp, Chlorella vulgaris
aggctgagctgctactttgtgtgccttggaggctgcggctgcgctcgaggcagtggagcagcagcagtaggcagctgacatttgagcatggccgctgctcgctcccctgccaccgaaagtctgtcgttgcaggtttttgctagctagcttgtaggtgtacgctttgcctcgcgctgctcggcggctggctttaacagaggccaggcgcagggcagccgtgggtatttggttctacatttcgtggggtcgcggatgggcagggtgagggggcaggggattgaaccttgtccccccgccctccagggcctggtgtaggcatcctttttcaacgagaagagcattttccctgaactgacgctggaggccaaacatgccagtcatgtgacgttggacttgcttgtaatcaatatataagc

SEQ ID NO: 1664 - DNA, 374 bp, Chlorella vulgaris
cggacgcgtgggcggacgcgtggggccttgagggccagggcaggcaggcgtggtgcttgcaagttggctaagcggtctggtagccaaggtcaccagcatgacagtcagctgctgggatcctttggcttcatgcttttgtcttggtgcaagcggcccttggtggcagatcgtgctgttcccgtgtaagctgtgcagtgtgaggaagcggttggtgtggcacatggcaagccctggccaggaagggtcgtagaggaacaagtggaccagttgcggaaaacattttttgtgtgcacgagtggtggtttttcctggcacggccctcggccattcgtccccaccactcgctttgtagcttgggtgtggcgcaaggcagt

SEQ ID NO: 1665 - DNA, 399 bp, Chlorella vulgaris
gcaagccgggaatcgagttggccttgagccgacgcgtttgacgcccgcagcagcacctaacacacgcaccaggcaccatgctcatctccacagaagaacaggcgtgaggtgtacaagttcctcttcaaggagggtgtgctgtacgcggagaaggacttcaacctgccggagcaccccgagattgagggggtgtccaacctgtaggtcatcaagctgatgcagtccatgaagagcaaggacttggtcagcgagcgctatgcctggcgccactactactggttcctgacggacgcgggcatcgagcacctgcgtgagtacctgaacttgcccatcgagattgtgcccgccacactgaacaaatcgacgaggcctctggagctggatggcgcatgcccgccg

SEQ ID NO: 1666 - DNA, 359 bp, Chlorella vulgaris
ctacaatgtcgacgacagcggcaaggtgcaacgcctgcgcaaggtttgcccccagtgcggccccggcatcttcatggccactcacttcaaccgcgtgtactgcggcaagtgccacctcacctacgtctatgacaatgagggagccaatgcataagcagcttgcgctcactgccctgacgggctgtggtgccgccagggaaactcttcgtctaatagggcgtgccctaaccagcagcctagtggacggagagccagcccgtggtaagcagcctggcatctcctcgtgcgtcctgcgtctctggactgactctgtggcagcagctggggtcggaggtcgtcagtctcgacgcctgctgtaa

SEQ ID NO: 1667 - DNA, 240 bp, Chlorella vulgaris
gcccagggccacgtacgcgtccgcatatgaacgcgctgattcgagggctgcccaccacccgtacttccgaccttcagcactttgccacggctgcagccatggccactgcggggcacgccactactgctgcaaacgttggaaagccaaagcttgagaaggaatttcttgtgtacaggtggagccctgagagcgaccagcctccgcgctatgactccgacaacgttgacatcaacgcgtgcg

SEQ ID NO: 1668 - DNA, 380 bp, Chlorella vulgaris
gacgctcaaggcacaagaggccaccaagcagcaggagcagaaagccaaggaagccgagtttaaggcggcggctgagaaggcagccatagagcatgagcatgtgcggtgggaggagcagcgcaagtctatgcagcaggatgcacaagccaaagcccagctggcacagtacaatgatgagctggcacgcaaacgtcttgacgtggagcacgacaagatgcggcagcgcaacgtggagctggtgcggctccaggaggagagcgcgcggcggcaggaggaggagcggcggcgcatagcggagcagatcgaggcggagcggcgggccacagagaagtacaaggctgagctggagaagcaggtgcagcgtgaggccaagctggcgg

SEQ ID NO: 1669 - DNA, 407 bp, Chlorella vulgaris
cccacgcgtccggcaacatcgactttctgcgggtggccaccaacgcacggcgcagggcgctggggcagtccgagctggacccgctggagttctacgcctttgtcatgcctaagcttgagtcgctgaacatggatgccgccttcctcaaccgcaacgtgaatgagggcttctcgggcggagagaagaagcgcaatgagattttgcagctggcctgcctggaggcggacatggccatcctggacgagattgactctgggctggacatagacgcgctgagggacgtgtcgcgctccgtcaactcgctgagaagcatgcggcccgacacgggcgtgctcatggtcacccactacaagcgcctgctggactacatccgggcccgacaggtgcacatcatgcaggacgggcgc

SEQ ID NO: 1670 - DNA, 427 bp, Chlorella vulgaris
gtcctgcactgcccaggctgcgctgcagagcactgctttcgcggctaagacccgcgtcagcagggtcacccgcagggccgtcgtggtccgggccgagaaggagaacacccagatcgaaaaggcggaccgcgttgccaagagcggcggccccatctatgtgaacgccactgatggctctgctctgtcgtaccttgacggcagccgccctggcgacttcggtttcgaccccttgggcctcctggaccccgccaccggctctggcggcttcatctcgcccgagtggctgacttactccgaggtcatccactgccgctacgccatgctgggtgcggcgggctgcatcgcccccgagatccttgccgccgccggcgtgatccccatgagccaggaggaggtgacctggttcaagaacggcgccttccccttc

SEQ ID NO: 1671 - DNA, 377 bp, Chlorella vulgaris
accaagatggcgaaggataagtctcgctccgccgaggtggtgacccgcgagtataccattaacctgcacaagaggctgcatggcataaccttcaagaagagggctcctaaggccatcaatgagattaagaagtttgcccagcaacaaatgaagaccagcgacgtgcgcgtggacgtcaagctgaagaaggccgtgtggagccagggcatcaagaacgtgcccaaccgcctgcgcattgtgatccatcgcaagcgcaacgaggacgacgatgagaaggaggagatgttctccctggtcaccctggccgaggaccagagcagcaagggcaagggcgtggtggtcctggaggcatagacacagacacgcgcctcacgggg

SEQ ID NO: 1672 - DNA, 228 bp, Chlorella vulgaris
cagaggagtaccttacaatggctccttcagggaagaaggatactaaggccgctaaggcggcaaaggccgtcaagatgtcccaatggaagaagactcgcaagccccgctacatcctgatcttccaaaggctgagtacactcatgcgctccagggaccccaaataccctaggtagagcgctccctcgctgctgaatatggacgccttcagcgtgatcaaggctcccttga

SEQ ID NO: 1673 - DNA, 342 bp, Chlorella vulgaris
cccacgcgtcggattcaatccaggcacagcattcagagcaaagcatcaacaatatgcttgcggtcgggtgcacccctggatcactcatcaatgccagggcggcacccaggaagcacaaccagcaggccgtgcgtcgtagctcgttggtgctaaaggctgttagccacccggaggccgctcctagcctggagaagctgcaacatgatctgcaaacagcactgcagcagaggcactagtggggtcgccgctgtgttgaagccgacgacgagctcacaaagctgaagaagaagtttgacaacactcttgcgcatgaccaccccgatgcccaggcggctgctactg

SEQ ID NO: 1674 - DNA, 379 bp, Chlorella vulgaris
gcgcggggcgtcgcctctgcggctgttttgcacagttacgcacggttacatcaaatgcgctgggacccttggggggtttgaccagggagaaacatggcatggggcggttgtgttgaagagacggcccctgcttggcttcggtcttatgtgttccgagtcatgtgcatgctacatatataggaggcggttccgggctgtgcgggggcgctcctggagggagggaaggaccttgtgggattggaaggacgaggctggctgggtgtcacacgacctgaggtagtgggcagccctagcctgcccttccttgcccatatgtctttagccccccgagagtgcatgtgagcacagcgtgcaggacttgtatgcccccagtgtgaaa

SEQ ID NO: 1675 - DNA, 394 bp, Chlorella vulgaris
cccacgcgtccgctgatgggcctggttgagggctaccgcgtgaacggcggccccgctggcgagggccttgacgccctgtaccccggcgaggcctttgaccccctgggcctggccgacgaccccgacagcttcgcggagctcaaggttaaggagatcaagaacggccgcctggccatggtgtccatgcttggctttggcgtgcagggcctgctcaccggcaagggccccctggagaacctggctgaccacctggctgaccccaccgtgaacaacggctttgccgtggccaccaagttcacccccggcaactgagctctagaacctggctccgcagcagtgatttgaggcatgcccaaacccatgagccgctccacaaacttgtgtaccctgttgt

SEQ ID NO: 1676 - DNA, 409 bp, Chlorella vulgaris
ggttccccgcctccaagacctaccgggagctggtgtcatgcagcaactgcacagactaccaggcgcggcggctggacatccggctgcgcacgatgaaggggccgggcggcgagggcaagaaggagtatgtgcacatgctgaacggcacgctaacggccacggagcgcacgctgtgctgcgtgctggagaactggcagacgcccgaggggctcaggatacccgaggcgctccggcccttcatgatgggcatcgactttgtgcccttccgccgccagtttgacgccaagggcaagctggtggaccgccccccgcccgcagcaggcgcagcaggcacagcagcagcaggcacagcagccgccccgggagaacggctcggccgccagcccagcagcgtcgatgagcaccagct

SEQ ID NO: 1677 - DNA, 383 bp, Chlorella vulgaris
  unsure (1)..(383): unsure at all n locations
cccacgcgtccgcccacgcgtccggcgcgtcctagcggccatagtcagttgttgcctctggaagaagggggaccatgaccaccaagcgcaggaaccatggaaggaacaagccagcgggcgcccgtggcaaggtgaancgtgtgcgctgcgagagttccgccgccatggtccccaaggacaaggcagtgaagcgctttgtggtgcgcaacatcgtggatgcctctgcactgcgcgacatccaggatgcacaggtgtacaacgagtacatgctgcccaagatatacaggaaggtgtactacagtatctccgccgccatccactcgcgcatcgtgcgcgtgcgctcgcgcaagaaccgccgcaaccgcgagccgcccaagttcgtg

SEQ ID NO: 1678 - DNA, 377 bp, Chlorella vulgaris
cccacgcgtccgcccacgcgtccgcccacgcgtccggcggcagctgcgagcagaacgaggttggcaagggcgcatttcaggagctggaccagctggcggcggtacagcagtacgtcaagtacgctgggcaggcaacctccacagcagacatcccccgggtggtggctgaggccttccaggccaccctggctggctgcccgggcgccgcgtacgtggacatcccctctaacagcctcatgagctcagtggacgacccccagcaggcacagcaggccttgggggcggtgccccaggcgcccagggcgcccaagccgcaggcgccggaggctgacctggccacagcagtgcacctgctgcggggagctaggaagccgctg

SEQ ID NO: 1679 - DNA, 343 bp, Chlorella vulgaris
gagagcctgaccctcttgcctccttttcaccatggcctctgcgttgattgccaagcccactgtggcccgcgtcttccagagccgtgcgtccaccgtgcgagccaggagcagcgtgaaggttgcagccgctgagaggcagctgtggctccccggcgcggacgcccctgcccacctgaagggtgacctggccggcgacaggggctttgatcctcttaaccttggaagcgagcccgaaggccgcgcatgggacgcggggggtgagaggagtaatggccgctgggccatgggtgccgtggccggtatcctggcccaggacctgctgggcaaggggaactggttcgag

SEQ ID NO: 1680 - DNA, 379 bp, Chlorella vulgaris
cgctttgccaacgacaacattgaccagacgcccgagctggcctccacgctccaatcctcagccatcgccaaccagctggagctgacggtgaagacgctgcccggggagcacgtgaggcctctgcagcaggacctcacacgcatctcgcctgaactggtgcgcgtcgccaaccaggcggtggtccagagcaatgacttctggggccaggtcacggcctttgcctcccgctcgggtctgccggagcagtcgcaggagcagctgtccagctttgccaaggcggcgcagggcgtggccagcgcgctgggcgaggcggtgctggattcgaacgccgggcagagcatcgagacgctggcagacgagcttgctgcgtggatggggc

SEQ ID NO: 1681 - DNA, 433 bp, Chlorella vulgaris
cggacgcgtgggttgagatcggctcgttcgccattgccgagtccctgcgcggcgccgctgagggcgagaagagctgctacccgggcttcaaccccctgaacctcttcgctgagggcgacgctgtctttgacggccggaccagggagatcaagaacggccgcctggccatggttgccttcttcggcattgtttgccagcacgcagccaccggcgccacccccctggaggctctgaaggcacaccttgcctcccccctgaccgccaacttcgccaccaacggcgtgtccctccccttctaagctgcttctactcccccattggacggatgtctgctgctgtggcggcggtttaactggaaggctgaagggcgtgctaggcacttggcatagcttgcaatttttgaggttgccaggatgccagtgcagcccgcagg

SEQ ID NO: 1682 - DNA, 222 bp, Chlorella vulgaris
gacccacaagtccgaattagagaaaaagagagaaaaaaaaaaaaaataaaatcagaaaaaataagctcataaacccatgcgcaagatccgggtcgcatagctcagcctcaactgttgcatcggctactcgggtgttcgcctgtactttgctgtagtggtgcttgtgcaattctccggccatcatcctgtgtttggtaatgcgcgctatccctttcgccagtc

SEQ ID NO: 1683 - DNA, 368 bp, Chlorella vulgaris
cccacgcgtccgcccacgcgtccgcccacgcgtccgcggacgcgtgggcagcgaaagtgacgaggacgatgacggcattcggcagcttggccagggccgccgggtcgtcatagaggaaatcaatgatggggaagagcctgctggcgccgctaagcctggggcgctgaaggcgctgccggcgcctgagacagccaacggcaaggctgctcactttggagatgacgacgtcagtgccagcgatgaagatgacgaggaggacggcgaagatgatgatgaggagtcatcggaggaggatgaggaagaggagaaggtttcacagcatgctcagcagcatgctggccagaagcgcaaatctgacgtagacccca

SEQ ID NO: 1684 - DNA, 385 bp, Chlorella vulgaris
cccacgcgtccgcccacgcgtccgcccacgcgtccgcccacgcgtccgagcaagtctttctgcaccatggcgtttgcgatgaagtctcaggtcagcgtgcagaaggcttccttcgcgaagccggccctcaaagcctcctgctccaagcgggtggcagtggctcgccccgtgagctgctctgctcagaatgagaaggccaccgccgtggctgccgccgcactggccgttgcccttggctttggccaggttgacgctgcctatgccgactttgcaggcctgatcccatgcgcggagagcaaggccttcgacagtcgcgagaagaatgaagtcaagctgctgacaaagcgcttgaagcagtatgaggccgattctgcgcccgccctgg

SEQ ID NO: 1685 - DNA, 434 bp, Chlorella vulgaris
ctgatctcctggtcgtgcatacttatcgcgcgtttgcaagatgctgggctccgtgaggcaggcagccatgcaggcagtgcgctctattcacacctccgccgcatctgcaggctcccacggctaccggtatgactacatccacggtcctcacatgtacgacttcatcgggatgcctggccgcaagttcaaaatgggcgtgtctgtggcagcctgcgccctggtgcccaccgccatcagcgcggtggccattgcgttcagccagagcaaggtgaagagcggctaaacttgggcttgacgcagcggagggaacgggcggcgctgttgcagtttggtgccccgggcctagcggggtatgctgctgatctgggttgagctggcagtaagggcacgcactgtatatgcaaccgcaaagctctatctggcgtaaaaatgtt

SEQ ID NO: 1686 - DNA, 160 bp, Chlorella vulgaris
ggcacctctgcaatcgatggcagcaaccatcctgttggccaggtgtaaggtcaagggcagtgcctgattagcccggccgccatcatgccaccttaatcgcagaccgccatatctcattcgcgatatgcgcacacccaggaacagcggcgcgcgccccccc

SEQ ID NO: 1687 - DNA, 393 bp, Chlorella vulgaris
agggcagctcgactgcaccatggcgacccccatctccaagaagaggaagttcgtgcaagacggcgtgttttacgctgagctcaacgagctgctcaccagggagctggcagccgatggttactctggtgtggaggtccgtgtgacacccatgcgcacggaaatcatcatccgtgccacccgcacacagaacgtgctgggggtcaagggacgccgcatccgcgagctgaccagcgtggtgcagaagcgcttcaagttccctgagggctcagtggagctgtatgctgagaaggtggccaaccgcggcctctgtgccgtggcccaggcagagtccctgcgctacaagcttttgggaggcctggccgtgcgcaaggcctgctatggtgtgctgcgttt

SEQ ID NO: 1688 - DNA, 393 bp, Chlorella vulgaris
agcccacgcgtccgcccacgcgtccgatgaagagcagggacttggtcagcgagcgctatgcctggcgccactactactggttcctgacggacgcgggcatcaagcacctgcgtgagtacctgaacttgcccagcgagattgtgcccgccacactgaagaaatctaccaggcctctggagcgggagggcgcacgctcgccgcgcggcgacaggccgccccgccgcttcgacggtgagggccgcagcggctaccgctctgccgagggcaagactggtgcccctggcgagtatcgccccgagttccgtagtggctttggccgcggctctgcccctccccattaagcagccaacacgacatggacgatgcaccggcggcccagcacggctacactga

SEQ ID NO: 1689 - DNA, 342 bp, Chlorella vulgaris
cgacactgcagccctagagcgagcaagcactggcgctggcgtaccatccaatgccgaacgtggcgccctcgatagcagcgaaactgcaccagggtcctcctacgctactgccactgggcgccccaccacctatgcacgggtgcatggccaagtgagccgtgctcccgccacctggcgacgtatagacacggttcagaactggcagctagaggagatcaagtatgagaaggcggagggagaaggcatcgccaaggttaccatcaaccggccacacaagcgtaacgccttcacaccacggacgaaccatgaaatgtccctgtgctttgctgacgcacgagacga

SEQ ID NO: 1690 - DNA, 347 bp, Chlorella vulgaris
gtggaatcccccgtcgacaacaggtccaaggttcacaagatgcagaccctctctgcccgtttcggcgtccgcgcccctgtctcccggggcacccgccaggtgacccgcgcctccgtggagtggtacggccccgaccgcgccaagttcctgggccccttcaccaaccccccttcctacctgaagggtgagttcgctggagactacggctgggacacctctggcctgtcctccgatcgcgacaccttctcccgctacagggacgttgaagtgatccaagcccggtgggccatgcatggcccccttggctgcgtcatgcccgatctgcaggaccgcaacagcaccgtcaa

SEQ ID NO: 1691 - DNA, 326 bp, Chlorella vulgaris
tccgcaacactgcagccctagagcgagcaagcactggcgctggcgtaccatccaatgccgaacgtggcgccctcgatagcagcgaaactgcaccagggtcctcctacgctactgccactgggcgccccaccacctatgcacgggtgcatggccaagtgagccgtgctcccgccacctggcgacgtatagacacggttcagaactggcagctagaggagatcaagtatgagaaggcggagggagaaggcatcgccaaggttaccatcaaccggccacacaagcgtaacgccttcacaccacggacgaaccatgagatgtccctgtgc

SEQ ID NO: 1692 - DNA, 178 bp, Chlorella vulgaris
gccacccaggcgtccggatggaggagcgcaaccatgtggccgtgggtgtgtcctggttccaggccatcagcgccgctctaggtgtggaccccgggcccacgttcccgcccctggcttcaaaactgttgccccaactcctgaaaggcccctttaaccatgaagaaaagggttttgcaag

SEQ ID NO: 1693 - DNA, 235 bp, Chlorella vulgaris
tcagatcttgtgctttcttgttaatatttatctatgggacaatgcaggccactatgtccagggtcgctctgggcatcatcgccggcctgacgccctctgctactgttcgtcccagggccagcacgaccgtggtgagggccatggctaacaagccggcccctgccatcctgcaggttgtagcgcccatcaacggccacccctacattggcatgctgaagacctcctttacctccgc

SEQ ID NO: 1694 - DNA, 153 bp, Chlorella vulgaris
cgcaaccggcaccaacttcacaccctgaatacagccctgaattttgacaggaaatcccctggctgcctcaaatttccacgttgttccacctcctgggggagtgcctgtttattcctgctaatttcaggggaaacgccttaacccctgggtttt

SEQ ID NO: 1695 - DNA, 400 bp, Chlorella vulgaris
gcgatctttagaaagtggtagcgctagtagcttgtgatggcggcccgcaccctcctcgttgcggcacttgccgtcgtgctggtcactttcgtggcggcagatggaagcatcgactcggaaatcgacgaccttgagggctagtgcctagaagagatcaacgagctttgggagaaatatacagagggcccagcggtggagggctgcgacgaggcctgcctacgggagtgctaccagatactccaagacgctgtctggggcaccaagaacaaaaattgccccttgcagtccgagattcagcgttgtttccacgtattttccgatgactgggaggactatgtgaaggagtgcgagcttttcgtcttttcggatagcgagagtgaacgcgagtcatcctccggcg

SEQ ID NO: 1696 - DNA, 180 bp, Chlorella vulgaris
aggttcaaatttcgtggccacctgatcatgtaggtacacctgacagcccaacatggcaaatgaaccggaacatcgcaagaagccaaacataacccagaaaggcacccaaggccctgctctggaagggtcccccctttgaaaccttaaacaattggaaaacaacctggaaaaatttttggg

SEQ ID NO: 1697 - DNA, 386 bp, Chlorella vulgaris
agcccacgcgtccgaagatgggtcgtgtcatccgcgcccagcgtaagggtcgtgggtcggtgttcaagtcccacaacacccacaggaagggcgcagccaagctgcgcgtcgtggacgccgcacagcgcaatggctacatcaacggcgtgattagcgacatcatccacgaccccggccgtggcgcacccctggccaaggtgacgttccgccacacccacaagtacaagcacgacaaggagctgttcatcgcccccgagggtgtgttctctggccagtacatctactgcggcaagaaggccaccctgaccattggcaatgtgaatcccgtgggcgacatgcccgagggtaccatcgtgtgcaacatggatgagacggctggtgaccgc

SEQ ID NO: 1698 - DNA, 388 bp, Chlorella vulgaris
cggacgcgtgggagctggtgctcaagaaggcgctggctcacgacggcctcgcacgcggcctgcacgaggcctgcagggccattgagcgcggccaggcgcagctgtgcatcctcgccgacgactgcaaccagcccgactacaagaagctgattgaggccctgtgcgccgagcagagcgtcaacctcattgccgtgcccgaccccaagaccctgggccagtgggcaggcctgtgcaagattgacagcgagggcgaggcgcgcaaggtggtcggctgctcgtgcgccgtggtcaccgactacggcgaggagactgagggcctggcggtgctgcaggagtacctgaagagccgctgagcgcatgctgtgctgggcatgctgtgcacccgccc

SEQ ID NO: 1699 - DNA, 58 bp, Chlorella vulgaris
gcggccttaaagggcgcccttgacggcggcctgaaaatccccaataagaaaaacccct

SEQ ID NO: 1700 - DNA, 406 bp, Chlorella vulgaris
ttccgagggccacccacgcgtccggcgcggcagtcacaatggcgaggaccgagcagacttttgtgatgctgaagcccgatgcggtgcagaggaacatcatcggcgtggtcattgatcgcttcctgagcaagggctacatcctacgcggccttaagttcatgaacgtgactaaggatcatgctgagcgccactatgctgacctggcctccaagcccttcttcccaggcctgatcgagtacattaccagcggccctgtggtggccatcgtgcttgagggcaaggacgtggttgtccaggcccgcaagatcatcggtgccaccaacccgctggcctccgacccctccaccattcgcggccagtatgccatcgacgtgggccgcaacatcatccacgggtccgactctgt

SEQ ID NO: 1701 - DNA, 238 bp, Chlorella vulgaris
ccacgcctccgacaacgcgtccgccccgtctcgcaacagttccagggcaatcactatgcaggccactatgatgaagaccttcggcgccagcctgctcaaggctttgcccattcagggcaagggcactcgccaggtgagccgcgcccacgtggagttctacggcccggtcagggcccgattccggagacccttcgcgcagggccgcacccccaaccacctgaagggcgagttccattgc

SEQ ID NO: 1702 - DNA, 363 bp, Chlorella vulgaris
gcggggcgcaagcttcgcctgcaccgccgtgaccagcggtgggcagacaaggactatggtaagagccatcttggcaacgagtggaagaagcccttcgccggcgcttcccacgccaagggcatcgtgctggagaagattggcattgaggccaagcagcccaactccgctattcgtaagtgcacgcgtgtgcagctgatcacgaactgcaagaagattgccgccttcgtgccccgctatggttgcctcaacctcatcgaggagaacgatgaggtgctcattgccagcttcggtcatctcggtcatgctgtgcgtgacatcacctgtgtgcgcttcaacgtggtgaaagtgtcaggtgtgtcgctg

SEQ ID NO: 1703 - DNA, 338 bp, Chlorella vulgaris
gcgccagggccccaacctgctcaagctgtcccgcaaggagcagtgcatggccctactgacgcagctgcgcaacaagttcaagattaacggcttcatttaccgtgtgttccccaacggcgaggttcagtacctgcaccccaaggacggcgtgtaccccgagaaggtcaaccctggccgcgttgccgctaacaccaactctcgcaggattggccagaacgtgcagcctatcacagtcaagttcaccggcaagatgccccaggacttctgagcagccttagcatcttggtagcatccgcagccggccttggtaacttgtgcaacctagggaaagatctggg

SEQ ID NO: 1704 - DNA, 392 bp, Chlorella vulgaris
agcaagccccttcagcaaaagatccacgatgcagaccgcctttgtccgctccggcctccgtgccgccgtccccaccgctggcaagggcacccgccaggtgacccgcgcctctgtggagtggtacggccctgaccgcgccaagttcctgggtcccttcaccaaccccccctcttacctgaagggtgagttcgctggcgactacggctgggacacctctggcctgtccgctgatcccgagaccttctcccgctacagggaggttgaggtgatccatgcccggtgggccatgcttggcgccctgggctgcgtcgtgcccgagctgctggaccgcaacggcaccgtcaactttggcgagaacgccgtgtggttcaaggctggtgccgccatctttg

SEQ ID NO: 1705 - DNA, 391 bp, Chlorella vulgaris
ggcaactgcatcttccagggcaaccaagttgttgggaatgccatccaaggtggcgcatcctcaggggaatcttacgccatgtatatgtactcccttgccaacccaccacctgcttgggatagcaacaatttcgatgtatcaactattatacctcccagcaacccctcttatcgtgtcttcgctgctgttccgtctgcggctcgcgagatcgtcaagataggctccctagcagctctgccgcaccccagcagccgtgtctttggcagtagcaaactagaccagatgcagatacagatcaggcactcaaatccgctgcaggaagggcaattcggcctgtggggcgagctcaatctagtggagctttctggtgcaaccacacccaggtcctcaa

SEQ ID NO: 1706 - DNA, 381 bp, Chlorella vulgaris
  unsure (1)..(381): unsure at all n locations
cccacgcgtccgcgcacacggcggcggcgccttctctggcaaggaccccaccaaggtggaccgctctggcgcctacattgcccgccaggcagccaaggctgtcgtcgcagcaggccttgcccgccgctgcctgttccaggtgtcgtatgccatcggcgtgcctgagcctctgtccatctttgtcgacacttatggcactggcaccatccccgactctgagatcctggacaagatcaaggccaagtttgacttccgtgcgggtctgatcggcaagaacctggacctcaagcgcggcggcaaccggtacatcaagacggcggcctacggccactttggccgtgaagaggaggatgtgttcacctgngagaaggtgattgccct

SEQ ID NO: 1707 - DNA, 337 bp, Chlorella vulgaris
cacacgcgtccgcccacgcgtccgcccacgcgtccgcccacgcgtccgcccacgcgtccgtctagatgacgggcggcagccccagcacggtttttatggccttctttgtgtttgcgtgcgccaccgggggcgtgctgatggtcatggagtcgctgtcggccttcctgcacgcgctgcgcctgcactgggtggagttccagaacaagttctaccacggcgacggctaccagtttgtgcccttctcgttcgccctggtggaccaagagaagctctgagggcatgtggagctgggtggtggcggggcaagcatgggtgcgttacagagctgggccgcggc

SEQ ID NO: 1708 - DNA, 390 bp, Chlorella vulgaris
gcggtatataactcatgccagagccgtcagcttcgcagcagggttgggcacagcaggcggtttgtacttgacaacaaagagactaatatggggatcagaaggggcgacaatctatagtctacctggggcgcctgccagacgggaggcgcaggtacaggaaccagtgtttgggcctgtctacagggcatacttggtacgaagatggaatgagactgtggatgctgccttcacccctgtcatcacggcgcttagcaaacggaacctttgacagaacggaagttgttgcgtcttcttagggttgtgtgaactattctccagtgaattccggcatacatgggtagtgtcatcctggatgttaccagccggttgcacctcaccttgtgagtgttg

SEQ ID NO: 1709 - DNA, 437 bp, Chlorella vulgaris
cccacgcgtccggcatggacagatggagtgaggacaccacaacagcgatacagcacgctcccgactacagtccaagagcagtgtcccagtttgtcaagtctcaagggcctccttcggcaccgcccaatggtgcagctccgccggctggcatcatcatacagccctcgcgcaggcagcagctggttcacgaaacagcacagaggctagcagcgccacaacaagctgctacaggtggcagccagattccctcttgggcgcaagagccgcctgctggcttctatctggatgtcaccaaggacggccagaaagttcaggagaataccctgaccaaggctgccaccttgctgggccggagcccagctgctgacgtaatgctcgaccatgccagcatctcgcgcaaccacgctgcactgtgctacaacctgccagtggatgca

SEQ ID NO: 1710 - DNA, 399 bp, Chlorella vulgaris
cggacgcgtggggcggtggggtcgcggggcatgatgcgggacaatgcctacgtgttcccggagggcgaccccgagctgctggggacgttctacccgctgctggcggccctggtgctggaggcggcgctgagggagggggaggaggaggagggggagccagacatgagcgatgccaacctcgcagccctggtacccctgctgacccggcacgaggtggtacgcaaggtgacccaggctttctgcctggagaggatgggcgcaggggacctgctcacagcccgggcactgctacaggccatggtggaggccaacagccgcatgagcgacaaggccatccccgagtttgcgccctttggctacaccctggcgcgacgcatggccgcgctgctggcagagggg

SEQ ID NO: 1711 - DNA, 354 bp, Chlorella vulgaris
agggagccttccccggctgagaaggagacgtcaacatggtggctgccagcaagaagagcaagaagtctcatgagagcatcaactctcgtctggcgctggtgatgaagtccggcaaatataccctgggctacaagaccactctgaagactctgcgcaacggcaaggccaagctggtgattatcagcaacaactgcccggctgtgcgcaagtctgagatcgagtactacgccatgctctcaaagactggcgtgcaccactacaatggcaacaacgttgacctgggtacagcctgcggcaagctgcaccgcgtgtcagtgttgactatcaccgaccctggtgactctgacatcatca

SEQ ID NO: 1712 - DNA, 390 bp, Chlorella vulgaris
agtttaatttgcgacatgctcgggtcatcgttgctgcgtgtagcgggtgctgcccctaggctcgcaggaccaaggtgtcaaactgctaggcaactctcatcccaggccagccgggctttgacaagcctagtgacccccagcgaggcgcggtggcaggagccacagccccagcggtcctcccgtggtagggcctatgccggctttgcggggcacgaggctggatttaagagtgccacctgcaaagaagttggctaggaggttactaagggtgccgtcaagtacttggacgtcaggaccccggaggagttccaggcggggcacgcccccggcgccagcaacgtgccggtgtggctgaaggcgggcggcggcatgcaaccaaaccccgacttc

SEQ ID NO: 1713 - DNA, 391 bp, Chlorella vulgaris
agcccacgcgtccgccgtcgacaacaggtccaaggttcacaagatgcagaccctctctgcccgtttcggcgtccgcgcccctgtctcccggggcacccgccaggtgacccgcgcctccgtggagtggtacggccccgaccgcgccaagttcctgggccccttcaccaaccccccttcctacctgaagggtgagttcgctggcgactacggctgggacacctctggcctgtccgccgatcccgagaccttctcccgctacagggaggttgaggtgatccatgcccggtgggccatgcttggcgcccttggctgcgtcgtgcccgagctgctggaccgcaacggcaccgtcaactttggcgagaacgccgtgtggttcaagggcggtgccccc

SEQ ID NO: 1714 - DNA, 374 bp, Chlorella vulgaris
gcgcgattcggccatgctgagcacgctgagcagcgccgctggcgtggaaagtacgggaccgaaaaccctcagcagcggccctgccgagctgggcaagctcagcgcgggcgaagcgcagcaggcgcagcagggcggggaacaggaggtgcagcagggtgatggcaaggtggcggtggagcagagtgagctggagaggctgagggctgctgcgaaggagaatgagcggctgaaggcagaactggaaaagctcagctctgcgcagcagtaggcgcggcggcaacactgccgcgccagtgggttcaaggcgggctttgatggctggtgcccgcctgcatgcacagtttgacagcggcggctgggtagtacagcgggat

SEQ ID NO: 1715 - DNA, 425 bp, Chlorella vulgaris
ccacccaagcgtccgaaacaatgaacgacatcaacacactggagcatgtcaagaagaatgtgtcggtcatcctgagcacgctgcccaagcgcgaacgcaacatcctgcgcatgcgctacggcctcttgcaagccgacgcggacgaggccgaccctgtgacatccgcctacccctacccccagcccgcccccccgcccatgccgctgccggccggcgccgaagccgccctggcggcggagctggtggcggccaggcccggccggctgcagcagcacctgctgcacgaggctggtgtggcagccagcagcggcggggcagggggcagctcgcagccgcaggagctgagcctgacggacgttagcctggcgtatggtctgtccaaggagcgcatccggcagctggaggaccgcgcgctgcggtcgctg

SEQ ID NO: 1716 - DNA, 256 bp, Chlorella vulgaris
gcctccacaagtccggagcagggcattgtcaagcccggtgacgaggttatcttcctgcccacccacaccgccgccaacccctgcatcggcaaggtcttcaccgtggagatgcaccacaagcgcgtggacgaggccggacccggcgacaatgttggcaggaacgtcaagggcctgcacaagggcaacatgccccgcactggtgacgtgatgatcctcaagtcggacggcactctgaaccccgtgaaggacgtcaccg

SEQ ID NO: 1717 - DNA, 283 bp, Chlorella vulgaris
ccaaaggttggccccaatttgccggcccccttaacaaactgaaccttgtcctccttaaacaatacaaccaaattttcaatgaacccaaccttattcaatccaaaggtaatgtcaactccaacggccaagaagggcctaatgggcccctccggggtcaaacccctggcccgcctgggtatggtgtccgatgcccccggcatgtctgccctcgacatgaacacagccgaggacatgattgttgaccgcacccgggaagtggttcccggcatggtcatctgtggca

SEQ ID NO: 1718 - DNA, 402 bp, Chlorella vulgaris
  unsure (1)..(402): unsure at all n locations
cacgcctccgcacatttcaagggcggcgagactgacttcgttgccaccaagctgatgacccgcctgacatacaccctggatgggatgaccggggagttcaagattgacggcagcggaaacatcagcctgaaggacgaggatggcatcgactctgcccccgtgaccgtgcagcttcctgacggcaagcgtgtgcctttcctgttctctgccatggaccttcaggccaaaggcagcgctgactggtttagctgcgagttcactgtgccgtcctaccgcggcgcaaccttcctggaccctaatggccgcggcgctgccaccggctacgacactgcagtggcactgcccgctgctggctatgctgangagctggagaaggacaacgcanagaagaccactgccctc

SEQ ID NO: 1719 - DNA, 309 bp, Chlorella vulgaris
agaaaaaaaaaaaaaaaaaaaaaaaaaaaaaaaaaaaaaaaaaaaaaaaaaaaaaaaaaaaaaaggaataaaaataaaaaaagaataaaatttaattatgctttaatggaagggtggtggctcttctgtcgggttgttcttagtactattcacgggttgtttgtttgtccacgtttttgttcgggcggttccctgcggttacttagcgtgtccttccttttacgcactttctcgcttgcgtcagcggggtttgttaactacataggtccgcattgtctggccatgtctcgttcttgggctgtgtgaatg

SEQ ID NO: 1720 - DNA, 297 bp, Chlorella vulgaris
agcttacaggtagtgagagtgccaccaaagccgccagaatgcagaccaccttcgtgggcaccacccaggcgctgcgcgccaaggtctccacccaggccactcgtggctccaaggtagcaacctccatgcgccgcaccgtcaagtccaagaacgtgaagaccaccgacaccagccagtggtacggtcccgaccgccccaagttcctgggccccttctccgagggtgctgtgccttcctacctgaacggcgagttcgctggtgactacggctgggacaccgccggcctgtccgccgacc

SEQ ID NO: 1721 - DNA, 248 bp, Chlorella vulgaris
agcccacgcgtccggttcagttacagcggccaacatgcgcgcgaagtggaagaagaagaggatgaggcgtctgaagaggaagcggcggaggcagagggcaaagtgattgcacagccccgcctgcaagccagcggcctgcagccttggaggatgcagcagccagctgcgtgtgcgcccgatagtctgacagcgctctttaatgtaacatctgcgcgtcaaaaaaaaataaaaaaaacaaaacaacaagt

SEQ ID NO: 1722 - DNA, 400 bp, Chlorella vulgaris
gacctactttggcgcggagctgcccttccagttcgacctgggcaccctcttcgccattgagatcggctcgttcgccattgccgagtccctgcgcggcgccgctgagggcgagaagagctgctacccgggcttcaaccccctgaacctcttcgctgagggcgacgctgtctttgacggccggaccagggagatcaagaacggccgcctggccatggttgccttcttcggcattgtttgccagcacgcagccaccggcgccacccccctggaggctctgaaggcacaccttgcctcccccctgaccgccaacttcgccaccaacggcgtgtccctccccttctaagctgcttctactcccccattggacggatgtcggctgctgtggcggcggtttaactgg

SEQ ID NO: 1723 - DNA, 252 bp, Chlorella vulgaris
  unsure (1)..(252): unsure at all n locations
cacgcgtccgcagctggctgcggcagtggctgcggcagctgctgnggaaggacnggcggttgangcggctgcggaaggctataaggcaggcctccaggcggctcaggaggaacagcaggagaagctgaagcagagacagcagcgaggccacccatctgaggcatctccacaaggctccgtccttccnccanaacccggggctgccagcagtgcatcagcagtcagcacagcaacaaagcctgctgctgctgc

SEQ ID NO: 1724 - DNA, 430 bp, Chlorella vulgaris
ccacgcctccgcccacgcgtcagcaatccgtctctggagccttccccggctgagaaggagacgtcaacatggtggctgccagcaagaagagcaagaagtctcatgagagcatcaactctcgtctggcgctggtgatgaagtccggcaaatataccctgggctacaagaccactctgaagactctgcgcaacggcaaggccaagctggtgattatcagcaacaactgcccggctgtgcgcaagtctgagatcgagtactacgccatgctctcaaagactggcgtgcaccactacaatggcaacaacgttgacctgggtacagcctgcggcaagctgcaccgcgtgtcagtgctgacaatcaccgaccctggtgactctgacatcatcaagaccaccagcgagtaggtgctcacctaccaagaaggggtgct

SEQ ID NO: 1725 - DNA, 395 bp, Chlorella vulgaris
agcggccccaacggcgtgaacctgggaggcctcctggcctgggagttcctgctgttccactatgtggaggtccgtaggtggcaggacatccgcaaccatcactccgttgacgaggacccaatcttcaagggcaacaaggtgcccaatgaggagatgggctaccccggcggcatcttcgaccccctgggcttcagcaagggcgacttcaagcagatgaaggagaaggagatcaagaacgcccgcctcgccatggtcgcctttgtgggctttgtcatccaggcgcaggccaccggcaaggggcccctggccaacattgccgaccacgtgtccaaccccttcgcccagaacatcaccaagaacattggcaactgcatgatccccgagtccgtcgacat

SEQ ID NO: 1726 - DNA, 187 bp, Chlorella vulgaris
ccgggtccacgacgagtccggaggaatccgtgtcgacaagaggtcgaaggttcacatgatgcaattcttcactgacgtttcagtctccgcgcacgggtcccacggggcatggtccaagtaagtcgcgcatccgttcagtgataaggtcctaaccatccttgctgcctaggaccgttcaccgaccctc

SEQ ID NO: 1727 - DNA, 392 bp, Chlorella vulgaris
agctctgcagggcttcaccatggtgaagtacgctaaggaggtggacaacgccaccaaggccgccaaggcccgggggtctgacctccgcgtgcacttcaagaacacgcgcgagtccgccgcagccatccgcggcaagagcctggtgaacgccaaggcgtacctggaggctgtcattgatcacaagcgctgcatcccgttcctgcgctacaatggtggcgtgggccgcaccagccaggctaagaatgagggcaacaagatcggccagggccggtggcccaagaagagctgcgagttcctgctgggcctgctcaaaaatgccgagagcaatgcagaggtgaagggcctggacacggacgccctgtacgtgtctcacatccaggtcaacaaggcgc

SEQ ID NO: 1728 - DNA, 391 bp, Chlorella vulgaris
agggagctgcacgacttcttgacgctgccagcccaggacatcatcattgccatgggcatgtgaacgccccttggtaaacccccttaaaacccgctgccaccccagggttgcggaaaggatgagcgtcaggcaaggggcgtgtggtgcgagttgagcactcagtgtagctggtctccttgcttgggagttttttgggcagcgttgcaacaccgccgtcagccaatcgcccagggtcaggacataccgcatgtaagcccgggtgggaggtcccacctcttgccatctgggaatatagtacggggttgtaatgatagaaaaaagccttccgtgcttcagaatgctcaagcaggaacgatatatgatgcatgggtggcagtttggtcagccaatg

SEQ ID NO: 1729 - DNA, 360 bp, Chlorella vulgaris
cccacgcgtccgacaacatggggtacggacgtgattttcaacagtgggcaaaccagaacaagctcaaggcagtcggctatctctggggcggctgtgttgccacaacgtttgcataccagtggacacgcccaatccccacacagttgaagattatccacacccgtatgtatgcccagggggtaacgcttgccgcactgggagcggtggcagcctcccacttctttgatgagggcaaggcctcaccagggtcttcccaggaccgagcccaggacagcatccctggcttggccgttgccaagtaatctcacctgtgttctgtgggaccctgattgatgggaagcgcaggttctgcccaggggc

SEQ ID NO: 1730 - DNA, 432 bp, Chlorella vulgaris
cccacgcgtccgccagcttgtttgacctcagcagcccgctgccctccgctactcctcgaccatctaaccagcagaaatggtgttcgcaaccaaggcagtcgccagcaaggccgtctcaacctggggcaagggcgccttcccgaagcctcccatcgatgtgctgccccttctgaccgctgtgggcgtgggctgcgttgccgctgtgtggtccatgggccgtaacctggcagtcaaccctgaggtctgctgtacaaaggcctaccgtggtggtgacagcctttggaatgatgaggagattcgctccaagtctgaccagttcaggcccttccccttcattctgcgcatgatggccaagcttggcaaggccagcactccctctggcgagtggagccagtgaccgaccgccttgagcagccctgcagcatagcaagc

SEQ ID NO: 1731 - DNA, 189 bp, Chlorella vulgaris
cccaagaagttggttacgacattgccaacgagacgtccaaggactggaatggtctgccccttaccgtcaagctgactgtgcacaaccggcaggccaacgtgaccgtcatccactccgacgtggcgcttgtcatcaaggcgcccatggacccccccaaggacatgaacaacgagaagaacatcaagcaca

SEQ ID NO: 1732 - DNA, 425 bp, Chlorella vulgaris
ccacgcgtccgccaacgcgtccgccgtcgacaacaggtccaaggttcacaagatgcagaccctctctgcccgtttcggcgtccgcgcccctgtctcccggggcacccgccaggtgacccgcgcctccgtggagtggtacggccccgaccgcgccaagttcctgggccccttcaccaaccccccttcctacctgaagggtgagttcgctggcgactacggctgggacacctctggcctgtccgccgatcccgagaccttctcccgctacagggaggttgaggtgatccatgcccggtgggccatgcttggcgcccttggctgcgtcgtgcccgagctgctggaccgcaacggcaccgtcaactttggcgagaacgccgtgtggttcaaggccggtgccgccatcttcggcgatgacgggctgaact

SEQ ID NO: 1733 - DNA, 388 bp, Chlorella vulgaris
agcggacgcgtgggcggacgcgtgggctccggcgttgtacgtcgctgtgcatttccgtctgtcaaggctaagaatgggttccctttgtcatcacctgggtgtgggtgctgcaccctttccttgggacccacgctcaagttaaccgtccggtacccaacaacacaccttggcgggagaggctgcgcggcgcctttgtctccagccttgctctagcctcgctatccttagtgtcgcagattttggttttctgtggtggggcctggccctgcgtctgtcaactgcaattggacaatacaacacctaacttatccttggcggatgctgtggtaatttggtggtcggatttgcgtcgtttgatttctactccgtttttactccatccttatga

SEQ ID NO: 1734 - DNA, 279 bp, Chlorella vulgaris
cggacgcgtggggaggtggggcaggccgggttcggtactgtgcggcgggcgttcctcattaacctgctggccaccttccccctccagatgacccccttccgcgaggccctctggaagctgctcttccgccaggagcttcatgggcccgggttttggctggtgacctacctgtcgctggtgtgtgtgtacctggccgcctccgtcatcacatccatctgggagcggctcatgattatcggcttcatcgaaggtgtgccggtggcgttcgtgttcccttgg

SEQ ID NO: 1735 - DNA, 387 bp, Chlorella vulgaris
gcagcttgtcaagcttgcgctgcgcggtccgtagtagggttacgccctttactatcgatagcgccacccttaccaagaatcatgtctcggagccgctacacgctgatcgtggacaacctgtcccgggatacgcgcagcagtgacttgaagaaggagtttggctattttggtcctatcctggaggttgagcgtgatgcacgctatcggtgcgctctagtggagttcaagaggcaagtggactgggtatgagccctcctggctatgggaaggacgggcgcgggtgactgtgtataagcatatactgtattatatcagccacacaccgtgcatacgagtgccctagtatgagcgcagggttgtctgcgtccagggtttccttaaagcgtg

SEQ ID NO: 1736 - DNA, 363 bp, Chlorella vulgaris
cccacgcgtccgacttactaaagatcgcagccatgggtggggagcgcgtcaggttgtacgtgagtggcaatatcctcggatacaagaggggcaagtccaaccagaccaaccacacctccctgatcaagatcagcggcgtcaactcaaaggctgagaccgaattctaccttggcaagaagattgccttcatctacaaggccaagaccgagaagaagggcagcctttatcgcgtgatctggggcaaggtcacccgtgcccacggcagcaccggcactgtccgcgccaagttcaggaagaacctgccacccagctccctgggccccaatgttcgcgtcatgctctaccccagccgtatctagtgga

SEQ ID NO: 1737 - DNA, 264 bp, Chlorella vulgaris
cacgcctccgcacacgcgtcagcttcacaataaaggactttgatggctcattcgtccctccccatcatgcagcattgcaagctagactagtagcacctgtgggtaggttgcgagctcagttgagagggtgcagggcgtttgtgtcagaacctaggcagcttcgcacgaccatgctccaagtggcagcagccttcaaggggtttggccaaccggttcagcccatgccgagtgaaagcaaggcttgcccctgccggagtggccctg

SEQ ID NO: 1738 - DNA, 363 bp, Chlorella vulgaris
ccgagtccaccacgcgtccgaacggccctccctgcagcgttggattaaggctgtgcaaggatggggtcgctcgttgccaacgagaactttacgcatatcctgcgtgtgctcaacaccaacgttgatggcaagcagaagattatgtacgccctgaccgccatcaggggtattggccgccgcttttccaacatctgctgcaagaaggctgaggttgacctgaacaagagggccggtgagctgagccccgaggagctggagagcatcatgaccattgtggccaacccccgcgcctacaaagtgcccgactgggttctcaacaagcagaaagacatccgcgatggccgcttcaaccagacgacctca

SEQ ID NO: 1739 - DNA, 391 bp, Chlorella vulgaris
ccggggccacccacgcgtccggacgctcgccccttctcggaagcatgtcaccaccatgcagaccgccactatgcagaagtccttcgtgggcatcagcgtgaaggcccaggcccaccgtgcccgccagatcatgatgcaccgtggtggtggcttcctccggctagaagattgacctgaacaagtagggcatcaactctgtctagaagtccattgtcaagctgaacctgcgcggcgagagcaagagcatgcagagcaaggactgggtggacccccagggccgcaagggcaacggctttggcgtcaaccggtttgccaacaagtatggtgccaacgtggatggctacgctcccatcatcacccctgacacctggtccgagtctggtgacagcta

SEQ ID NO: 1740 - DNA, 260 bp, Chlorella vulgaris
cgcaatagttccagggcaatcactatgcaggcaaccatgatgaagaccttcggcgccagcctgcgcaaggctgtgcccacccagggcaagggcacccgccaggtgacccgcgcctccgtggagtggtacggccctgacagggccaagttcctgggccccttctctgagggctccacccccagctacctgaagggcgagttcgccggcgactacggctgggacactgctggtctgtctgccgatccccaaaccttcgctgc

SEQ ID NO: 1741 - DNA, 426 bp, Chlorella vulgaris; identical to SEQ ID NO: 96

SEQ ID NO: 1742 - DNA, 406 bp, Chlorella vulgaris
gatgcagaccctctctgcccgtttcggcgtccgcgcccctgtctcccggggcacccgccaggtgacccgcgcctccgtggagtggtacggccccgaccgcgccaagttcctgggccccttcaccaaccccccttcctacctgaagggtgagttcgctggcgactacggctgggacacctctggcctgtccgccgatcccgagaccttctcccgctacagggaggttgaggtgatccatgcccggtgggccatgcttggcgcccttggctgcgtcgtgcccgagctgctggaccgcaacggcaccgtcaactttggcgagaacgccgtgtggttcaaggccggtgccgccatcttcggcgatgacgggctgaactacctgggcaacccctccctcatccacgcacag

SEQ ID NO: 1743 - DNA, 434 bp, Chlorella vulgaris
ctgtccgtcgccaagaagagcggcagacaaaatggatacgcccgtgaagctggccatcgtgatgaaggtcatcggcaggactggcagccgtggtcaggtgacccaggtgcgcgtgaagttcctggatgaccagaaccgcctgatcatgcgcaacgtcaaggggcccgtgcgcgagggtgacatcctgaccctccttgagtctgagcgcgaggctcgtcgcctccggtaatgcgggaggagctgggggcgctggcgcaagatgtgacccctgcgcgcctggaacagcagtgtgtggatggcgtgcagcgtgtagcagcagcactggcagaggcgggctgggtgggcccctttgtgtgcagctgagacgtgttgagcgtttgcacgcggcaacgcagcagcagcaacagcagtgagatgtgggcgtgaagtactgt

SEQ ID NO: 1744 - DNA, 372 bp, Chlorella vulgaris
cacgcgtccgcccacgcgtcagcccacgcgtccgcccacgcgtccgcccacgcgtccgcccacgcgtccgcccacgcgtccggagagcctgaccctcttgcctccttttcaccatggcctctgcgttgattgccaagcccactgtggcccgcgtcttccagagccgtgcgtccaccgtgcgagccaggagcagcgtgaaggttgcagccgctgagaggcagctgtggctccccggcgcggacgcccctgcccacctgaagggtgacctggccggggacaggggctttgatcctcttaaccttggaaccgaccccgagcgcctcgcatggtacgcggagggtgagaggataacggccgctgggccatggctgc

SEQ ID NO: 1745 - DNA, 423 bp, Chlorella vulgaris
  unsure (1)..(423): unsure at all n locations
ccacgcgtccgggccgctcaaccggccaagcccgtgaaccccctgtatgagaagaggccgaagaccttcggtatcggtggtgccctgccacccaagaccgaccttcaccgctttgtgaagtggcccaggtatgtgcgcatccagaggcagaagcgtgtgctcaaccagcgtctcaaggtgccccccgcactgaaccgcttcacccgcacgctggacaagaacatggccgatagcctgttcaagctgctgctcaagtaccgccccgaggacaaggcagccaagaagcagcggctgctggctgaggccgaggcccgtaccgccggcaaggaggtggagaagaagaagcccgtggtggtcaagtttgggctgaaccacatcaccacgctggtggagcagggcaaggcgcanctggtggtcatcgcg

SEQ ID NO: 1746 - DNA, 168 bp, Chlorella vulgaris
gcctgtctcaattttgttgtaacagcaaggctactagggttggtcggcatgggcgcgcggagctcgctatttatggtcaccatgggcgcaggcatcagaattgctgtgtccttcccattcggaggtgaccaactcccacggtgggagtgctgtaaagtttctcatgtc

SEQ ID NO: 1747 - DNA, 417 bp, Chlorella vulgaris
gcggacgcgtggggtggtttgcgacttaaactcagcaagtgttgtggacgagattcgaacgtcatatggcacttttatcaaccggctgcaagaccctgtcatgagcagcatcgaggacagggtgtcgctctggaccaagctacccgtctcccaccaggaggatacccaagtgctcaggtatgagcattcccagaagtacggtgcccactacgacagcgtcagcgccgagaagtccccacgaatagccacagtactcatgtacctgagcaccccggaggagggcggcgagacaaccttctcgctggactccaagtggatagacccctccctgcctcgcaagctggggcctttcatcgactgtgcggaggggcatgtagccatgaagcccaagaagggcgatgctctggtcttctgggg

SEQ ID NO: 1748 - DNA, 364 bp, Chlorella vulgaris
  unsure (1)..(364): unsure at all n locations
accgctgactgcccctaactttgccacgccaagtcctgacaggggttccaactagccagctcaacaagtggtatatacagaaagatggagattgacggcagatcaggacggaagcagaagggccgtggttttaaagagccgatggagacagacgaccggacgaagggaggggactatgactcactccccgctgacagggcagggccaaggccagccaagtccgtggaagggtgggtgctggtggtgacgggcgtgcacgacgaggcgcaagacgaggacctgcacgaggcctttgccgagtttggcgatgtgaagaacatctacctcaacctgnaccgccgcaccggctttgtcaacggctatg

SEQ ID NO: 1749 - DNA, 419 bp, Chlorella vulgaris
ggtcgaggcacgcgtcagcccacacgtccggtgggctgtgatgggcttcatcttgtgggcacagccagatggtggtgcaagcggctgtctgactcttggtttgtcttctgcgccctgggctcagaggcggtaggggttgcaatggatgaagtgactgcactgtgtctggctttgcttgccttcaggacggaattatgattatgacgcccacagagtgtgagttctctagccaggcatgcttaggctgctgggctgtcaacgaacgtgttcaggcctagcaaggttgttgttccctgctctcggtgtgcccttggcggtgtcgttgcaacatatgtagatgtattgcctcctcggtgtgtcgtgtaacattgacccagcagtcaaaaaaaaaaagaaagggcaccagccagagacccgac

SEQ ID NO: 1750 - DNA, 408 bp, Chlorella vulgaris
atccagttcaaggaccccaacagcggcaaggagtacaagctgaaggacaagacggccatcatggtcatgcggccccgcgggtggcacctgtgggagcaccacatgctggtcgacggcaaggccgtccccggcgccgtctttgactttgcgctgtactttttccacaacgcccacgcgctgctcaagaagggcaacggcccctacttctacctccccaagatggagtcgcacttggaatgccggctgtggaacgagatctttgtggacgcgcagaacgatctgggcatccccaacggaaccatcaaggccacctgcctgatcgaaaccctgccgggcgcgtttgagatggacgagttcctgtatgaactgcgggaccacgcggcggggcttaactgcgggcgctgggac

SEQ ID NO: 1751 - DNA, 246 bp, Chlorella vulgaris
cccacgcgtccggctgactgttgtacagcctggccgctgtgcttccttatcctgtggtgctctgtctgtaagtgcttaggcttgcttgggcggtggcagtgcggtgcagcgcagtgcagcagccttggaggcggagcaggcagctgctgtgtggcagagtaacagttgcatgtgaggctgactgttgtacagcctggccgctgtgcttccttatcctgtggtgctctgtctgtaagtgctcgcttc

SEQ ID NO: 1752 - DNA, 373 bp, Chlorella vulgaris
gctgagcgctatggatgagcagaagcaggggggctctggcaagaggaagaggagtgtagctgtgggcctgggcctgggtctgggtgctgccgccctgctgggtgctggccaggctgatgccgccaccgaggccatgcagctggctgctggcgacggccgtggctctgtcatcgccctgctctttgttcctgctcttggctgggtggcctacaacattgggcagccattcttgaaccagctggacgccatgaacaaggactaggtgcttagttccaggcacgaatgtcgaatcagctgttcagggctcttgaggagtggacccttgcagcgtttgtttcactaagcaggcctgtttggcagtgcaagcttgctg

SEQ ID NO: 1753 - DNA, 371 bp, Chlorella vulgaris
cccacgcgtccgcccacgcgtccgcccacgcgtccgagcctagctagggaccatgctggcgttgaggaagatctccatgtggttggggtggaacacaatccagtctacgtaaatgtgcgccaggtcgctgtgcctgaagaagccagcgaaggccacggcaatggcagtgcagatcatgaggtcttctgcctcgcagccggactgggctgtcttctcacagatgcctaccacatgctccagcagaagcacctccttcttctgttggccagctggcaacagacgtcgtgctgcttcccgcacagccttgaccatggggtgggagggcccaggcgcggcagcgcccccagctgtagccgtactgggtgaaggtg

SEQ ID NO: 1754 - DNA, 408 bp, Chlorella vulgaris
cctaagcagcatgtcgtcccttgtgtccaagcccgtggtggttgccaggcccagccaggtggcccggcgcccactagctgcccaggctaagccccgcctggtgtttgtcagggggaccggcccggataagtctgcgattcaggaggctattaaggacgccgaggagacgtgcgctggtggtaacactggcgagtgcgctgccgcctgggacaccgttgaggagctgtccgccgctgcctcccatgcaaaggatgctgcaaaggccaacccctcttctgtcgacccccttgagaagtactgcgaggaccagcccgacgcggacgagtgcagggtgtttgacgactgaagctacggcttaacggcgcgtaaacagcagagccccctgtatgcggaactgcaattgcggcc

SEQ ID NO: 1755 - DNA, 367 bp, Chlorella vulgaris
gtaccggtcgagattccgggtcgaccaagcgttcggaaaaatcacccgtcgacaacaggtccaaggttcaaaagaatgcagaccctctctgcgggtggtcggtgtacgggctcctgtctcccgtggcagtcgccaggagatccgcgcctccctagagtggtacggcccttaccgtaaccagggggcctgggtcccatcatcatccccggttcctacctgaagggtgacttcgtaggcgactaggggtgggacacctctgcgctgtctggcgatcccgagaacatgtcccgctagagggaggttgacgtgattcacgcaccgtgggtgatgacttggcacccttgtgtgcatcgtgccctaactgctg

SEQ ID NO: 1756 - DNA, 377 bp, Chlorella vulgaris
ctattagcttgtgatggcggcccgcaccctcctcgttgcggcacttgccgtcgtgctggtcactttcgtggcggcagatggaagcatcgactcggaaatcgaccaccttgagggcgagtgcctagaagagatcaacgagctttgggagaaatatacagagggcccagcggtggagggctgcgacgaggcctgcctacgggagtgctaccagatactccaagacgctgtctggggcaccaagaacaaaaattgccccttgcagtccgagattcagcgttgtttccacgtattttccgatgactgggaggactatgtgaaggagtgcgagcttttcgtcttttcggatagcgagagtgaaggcgagtcatcctccggcg

SEQ ID NO: 1757 - DNA, 373 bp, Chlorella vulgaris
ggcggaaccctgggccgttacctactaaagattgcaaccaagggttgggaacccgtcaaggtgtacgttaattgcaaaaacctccggtacaataaggggcaagtcaaccaaaacaatcaaacctccctgaataaaatcagcggggtcaactcaaatgctgagaccgaattctaccttggcaaaaagatatccttcatctacaaagccaatacccataagaacggcagcctttatcgcgtgatctggggcaaggtcacccatgcccacagcagcaccggcactgtccgcgccaagttcatgaagaacctgccacccagctccctgtgcgccaaggttcgcgtcatgctctaccccaaccgtatctagtggactg

SEQ ID NO: 1758 - DNA, 386 bp, Chlorella vulgaris
  unsure (1)..(386): unsure at all n locations
gactgccccagaaaacaaccgaggatgcggacccctgcaaacgtacttggcttgaaaaggcggtgactgngccggggtcagcaatagctctggccttcatctgcaacaaggcgcttatgcctgtgcggcttcctataaccatagccttgacaccagcagtggccaggatacttcgtgctaaagctaagcccgtctgacgtgatgtcgtcctgggggctacgggttaccgacacacattcttgctcttgacccttcgctcatctgcttacacactccagttatgcgatccggcttgtaagtactggtccccctggggtatgggttcttgcatgctagtcagaacacgaggcaagcatcagcctcgcagctgaacgttcttgcttgtg

SEQ ID NO: 1759 - DNA, 430 bp, Chlorella vulgaris
  unsure (1)..(430): unsure at all n locations
gttttccccttggacggctcggacctggccaggatacccaactggcggggcaaagctgggggcggcaagcccctcaagcagcccacacagagagaaaagctagcagtgctgctgccgtgctggagcgactgcccacaagcctccatcctggtggtctacctctccagccttctcatgcagcagggcattcctttccggatacatgtcctggagcaagtgggcaaggccgccttcaaccctgngctgctggtcaacattggctaccagctggcccaganggcggaaggcggctttgctgccaactatgtggcggtgcagcgagcaactctaacaccatatgtgaatgtgtcatacgcctttcccagctccccgtttctgcacttagcagccgagcagtccctatacagcaaccaggtcccctacgagccct

SEQ ID NO: 1760 - DNA, 256 bp, Chlorella vulgaris
agtgcaactgaggcaagccgggaatcgagttggccttgagccgaagcgtttgacgcccgcagcagcatctaacacacgcaccaggcaccatgctcatctccaagaagaacaggcgtgaggtgtaccagttccgcttcaaggagggtgtgctgtacccggagaaggacttcaacctgccggatcatcccgagattgatggggtgtctactctggaagtcaccaagccgatgccgtccacgacgagcaaggactttgc

SEQ ID NO: 1761 - DNA, 411 bp, Chlorella vulgaris
cccacgcgtccgcggacgcgtgggttgcctgccatctgacttgtcctcgccgccaggaggcctcttcgagccctgcctggctatcccacttaggacaagatgccgcctaagcgtaggagctctcaggaggagaatgtcaccctgggccctgccaccagggagggtgagctggtgtggggtgtgtgccacatcttcgcgtccttcaatgacacctttgtgcacgtgactgacctgtccggcaaggagaccctggtgcgcgtgactggcggcatgaaggtcaaggccgaccgtgacgagtcctccccctacgctgccatgcttgccgcccaggacgtggccgctcgctgcaaggagctgggtgtgaacgctctgcacatcaagctgcgcgccactggcgggcaaccgcacaaa

SEQ ID NO: 1762 - DNA, 321 bp, Chlorella vulgaris
cgcgctttggccacggctcagccaagctggcgcgccaggcacagagtaaggagaaggtgctagccaagatggtgccggaaaggctgaacgagaaagttgaaggccaacaggttgttccggttcccctttgaaaacttcggaaacctgccgccgccggtgctgcaatttacaaaggtgccttttgggtacccgccagacaaattccggtaccggaatgtgaccttggaaaccaacttggattctcaatatacccttggtggttcaaaacgggtgcggaatctcaacactacacactctgatcacagggcccttgtatcctgt

SEQ ID NO: 1763 - DNA, 395 bp, Chlorella vulgaris
aaaaaaaaaaaaaaaaaaaaaaaaaaaaaaaaaaaaaaaaaaaaaaaaaaaaaaaaaataaaaaaaaaaaaaaaaaaaaaaaaaaaaaaaaaaaaaaaaaaaaaaaaaaaaaaaggggcggccccccaaaaggttcaaacctaacttacccttgaatgcaacttcaaacccctccaaaagtgccaccaaatttcaattcacgggccttcttttaaaaacttcgtaacgggaaaacccctggctttaccaaattaaacccccttgaaaaaaacccccctttcccaacctggcttaaaaccaaaaaggcccccaccattcccccttccaaaaatttgcccaccctaaatggcaaatggaaccccccctgtaccggccaataaaccccggcggttttg

SEQ ID NO: 1764 - DNA, 299 bp, Chlorella vulgaris
ccacaaccaaaacaagaaggcccacaggaacggcatcaagaagcccaagaggcagaggttccactcaaccaagggcatggaccccaagttcctgcgcaaccagcgttatgccaagaagcacaacgtcatcaagggggaggaggagaagtgatcagctggatacattccatggagccctgaggtcgtagccagctcacaggaggatggttgtggtggcccgcttgctcaggcgggacttggtgcaacagtgtcatgcccaggatgcagcgacagtttcacagtggcggactttgtcacca

SEQ ID NO: 1765 - DNA, 387 bp, Chlorella vulgaris
agacgacgtttgtaggcccatctgtagcggcagccaggcacgatggtgcagattggcaagaaggctgctagcggccctaagaagggcaagaaggccctgaccttcaccatcgactgctccaagcctgtggaggacaagattatggagattgcctccttcgagaagttcctccttgacaagatcaaggttgagggcaagacaggcatcctgggtgacaacgtcaaggttgtgcgcgagaagaccaagatcacggtgaccagcgagattgccatgagcaagcgctacctcaagtacctcaccaagaagtacctgaagaagcacaacgtgcgtgactggctgcgtgtgattgcgtccaacaaggaccgcaatgtatacgagctgcgctac

SEQ ID NO: 1766 - DNA, 411 bp, Chlorella vulgaris
  unsure (1)..(411): unsure at all n locations
gtcgaccgaccgtccggcgacggcaagctggcgtacggcgtgtatgtgcanaatgggcggcttaagggggagatgaagaagacgcggcgcgctgtgatccagcagtacaacatccccatcatgatcaccgccacgcaaaacctggtactgcgcgagatcgagcctgcatggcggtcggacatcgaggcgcagcttacggccggtggcgtgaaggatgtgtcagagtgggatgcgatcgagtcctggtccatggcgtgcccagcgctgccgctgtgtggccttgccatcggggaggcggaacgaggcctgccagcaatcaacgaccgcatccgggcgctgctggacaagctgggctttgacgccaacgagaagttcgtggttcggatgacaagctgccccaatggctgcgca

SEQ ID NO: 1767 - DNA, 356 bp, Chlorella vulgaris
ctctgctactctttcaatggcctatgcagctgcccgctttgctgagtcggtgctgctggggctgaccggcgagcaggatgttgtctagtgctgttacctggaatccaccctggtgccacgcctgaattactttgctagcaaggtgcgccttgagacatatggtgctgaagagattctgcccattggcgaactgtcagcctttgagcagaagggcctctaggatgctaaggatcttttggcaaagaatatcacagctggcattaagtttgcaaaggcggcagcagcatgaacatatgcctgaaactgtggtttgcttagagatctgggacattaatacaccaagttcccatagctgt

SEQ ID NO: 1768 - DNA, 433 bp, Chlorella vulgaris
cccacgcgtccgggggctcctgccctgccacagggcggcctgcttctgtccgggagtgccgctgtgcgggtaggacccccctatgcacacttttcctcctacgctcttcttgcgcccacgcttattgggagcacagttgcattaaaattgacaagaatgtatgctgtttacgaaatgtggcggcaatcaataagcagcaaagtctgcgctggttagttcccagctcgtgggtaagcttgttgtcaaaacttgtgttcagtccaggacttctgtctactctctgtgcctgtcagtcagcactgtgttttcacacttgttgttcaggtcgggtgattgttttgcacttgatgtccagaggggcagttggtcaagatggttgttgcaagaacttgcagggcaccttgtgatggtgaatgaggaccgcttgaaatgc

SEQ ID NO: 1769 - DNA, 395 bp, Chlorella vulgaris
  unsure (1)..(395): unsure at all n locations
agaagatcgacaagcacctgtaccacgagctttacatgaaggtgaagggtaatgtgtacaagaacaagcgtgtgctcatggaggccatccacaagcagaaggcagagaagattcgcgagaaggcgattgtggaccagctggaggcgcgccgcgccaagaacaagcaggcacgcgcccgcaaggccgcccgcagggaggagcgcttcgcaacagggcagatcggcactgccgccaccgagtccaagaagtaaatgagccacccttggtgttggctgactgccggctggctgggtgctgctggctgctgttgaggccgttaacagcaaggacagggtcactggtgaatggcagctgttgccgtcgctacanaccaagggggcgcagcggcagcagcg

SEQ ID NO: 1770 - DNA, 398 bp, Chlorella vulgaris
cagggatatagtatcacgtggagcagccttgatgatgtgctgagggctgtgcctagctgttagtggttgagccacaactgggttaagggttggagcaagggttatgcaggcagcttgttgggcctgccggcgggtgcctggtacatgcttggttggttacgttcgccagaggccatgtggggccaggcattgtacgcctacgatggctgctgcacagtcaatgatcacgcaataggggcacgatgtgagaaggccgggttgggaggcatgtggacccgcggctgatctgcgtcggtgctatgcttgccagctcatgttatagtaagcttggtgtttgggtctggcaattgggcgcctttgctcctgtaaagcggaggtacatcaatggtccatacata

SEQ ID NO: 1771 - DNA, 405 bp, Chlorella vulgaris
ccacctttgatattggtgatcgactggtagcagagaagattacctaccgatttgtcaggtggggtacatggatagcgaggggatgaaacgaggctcggcaatgaacatgcgaactgcgtaggagatccctagtgcgatagctattgtaccccacctttgatattggtgatcgactggtagcacagaagattacctaccgatttgtcaggccgcccaccccgggtgacgtggtgatcttccaccccagctctgctgccctgggtggtcggacacttggctggtttgacgacgacgtgttcatcaagcggatactagcggtggcaggtgacaccgtgtaggtccgggatggccggctgattgtcaatggcgtgccccatactgagccctacctgtctgaagcgccca

SEQ ID NO: 1772 - DNA, 404 bp, Chlorella vulgaris
cggacgcgtgggcaagaacggccgcctggccatggtctccatgctaggcttcttcgtgcaggccattgtgaccggcaagggccccatcgagaacctgaacgaccacctgtccaaccccggcaacaacctgtgggctctgtccgccaccctggccaactaagcagctccccctggccgtgccttgagcctgcctgccccgggcgctcccggctattaacggacgatgcgtccctactgaaggcatctgagcagcttttattcagccattgcggcacagttttgggtgtgctgggattctgcatgcgcgcctgccacacgcctccccgagaagaaagagtgctcgtacacaacccccctgttctcctccgtctccgtttttcgcttgctagtcctttctgttgccg

SEQ ID NO: 1773 - DNA, 306 bp, Chlorella vulgaris
ccgacgcgtcggcacaagcgtccgcggacgcatgggcggaagcgtgggaaaaatcgagaatgaaaaatgtaaaaggaaaaggaaaaatagagaaaaattaatgataaaatgtaaaaaaaagaaatagaaaatgtgggatctgatatgtaaaaatgaaaaaataaaaaggatcaaaatgaatgtgcaataaattctgattgatatgggagggggtgggctattaacggattatgcatttctaatgataggatctgaatagcttttattgatggattattgcagatttttgtatgtgctgggattgtt

SEQ ID NO: 1774 - DNA, 353 bp, Chlorella vulgaris
cggacgcgtgggcaagactgcaaaggagtgttcagctgagtgtgcttgtgaccggtcaccgcagcgacgcagcaggtgaagggttttgcagggagctagggaggcgcagccatcaggggtggtaatgggtagctgtgccaaaggggaagctactcaaaaaaggctgccgttggctgcttgtcatgtattgtccgtgcgaacccactcctgcctgtgttggtgcatacccggggaagtccaaatcctttctccttcgtcattatggtgcccttccaagcgctttgaaagggccccccgacactgcagtgcaccgagcagtatctgcgggggccgtggcattgtccaggatttgt

SEQ ID NO: 1775 - DNA, 322 bp, Chlorella vulgaris
acccacgcgtcagggcagggtgctagggtcgtgttaggcggcatactgtattagagcagcagaagctggggcggtgcttatgggtgctgagctgcaggcaatacgtgcgaggagcgtcaaacattagtgggccgttcgaccctgagaatgctgggctgcttcctcggaatttcaggagccagtgatagcgttggaatggtcatgcaaggcgctgacccagggcacttccacactacattcggaccaggtgctcgtagacaggtgggagcatggccctagcagtaaactgtccacctttacccaactcaatttcactagcatg

SEQ ID NO: 1776 - DNA, 273 bp, Chlorella vulgaris
gcgtccgggtccaaattgccagcggggccctttttttttttttccccaaattccccaaaaaaaaaaaacaaaaaaaaaaaaggggaaccagaaaaataacaaaaagaagcgagcaaacaatacctcagaacggacaggtaaaacggattccaacggcggccctagaggccaaaaaaaaaaaggggggggccccccaaaggttccaacctttttttcccgggaatgcaaatttaaaccccctccaagagggccccaaaattcatttccgggggg

SEQ ID NO: 1777 - DNA, 409 bp, Chlorella vulgaris
ctcaaaacctgagacatgggggctgccaaaggcctgtcgatttcgaccttagcgaccactgtgtggcgatttattaacggagattactagctctacaattgctgcctattgggtgttgacttggttagactttcttgttgttgagtgatgccgccagtgtgcatggctggggccaatgccttctcccattgcctacttgccttgactggtgtacacttgctcgctgctggtgcagctgagatgatatagatacgcttctggggttactgttgtagctgtatatgagccaagttcctgtgtgctactatggggttttccagcactgctccagtccaatttcattgcgtgctgtgcctgcgaggctggatgacgtctctattgcgttggttagcgtgcgtatcgtggccct

SEQ ID NO: 1778 - DNA, 398 bp, Chlorella vulgaris
gtatctcacggcgatccagctgacgagccaggacctgctgaggtacctggcggtggctgtggtgatcaacaagcggcggcgcaacgtggtgacggacctgatcaaagtgatcagccaggagcggtacgagtaccgcgaccccatcaccgacttcctgtactgcctctttgtcgactttgacttccagggggcccaggacaagctggcgctctgtgaggaggtgctggactcggactttttcctggtgaatgccaacgaagctttcatggagaatgcccgccagttcctgttcgagacctactgccgcatccaccagtccattggcacccactcgctggctgagaggctgggcatggatgacgagtccacagagctgtggattgtgaaccttattcgcg

SEQ ID NO: 1779 - DNA, 331 bp, Chlorella vulgaris
gtttcaccagcgccaactttggggacaacaacatggggtatggcaacaacctcggctggtcggtgtctggcagcgacaacgtgggcaacttcaacaatggctcaaccaaccttggtgactacaacctagggtctgcgaaccggggctccttcaaccaggggtctgccaactacggcaactgcaatatggggagcgccatgaagggtgactttgttgagtgcccaggcacggagctctactgagcgacctgtcatgcccagcttgctcagcagtggcttactaccgagagttgccttcacccgcaacagttctgtggtttcacaatggcttc

SEQ ID NO: 1780 - DNA, 407 bp, Chlorella vulgaris
cggacgcgtgggcggacgcgtgggcggacgcgtgggccgcaggcggcgcacggtgcggggcttgaaccgtgcgcgctccatcacgtctgtggtgcgcgtggtaaagcagcaggacacggagaccattgccaggctgctgaacgcgatgttcacctttggggacagcgcggagaccatacgccagctgttcgttggcgtgtctggccatcagaagctggagctgctgtcgcggttggtgaggatgctgggctacgagtcgctggcagtctttggggactgctttgacgaggtggtgctgctggaccctgtgctgtacccgggcgcgatcaaggtgtttgcgcgcgaggtgtgccgcaacgacatcctcaactttggccgcatgcacttcttcttccccgactcgcgcc

SEQ ID NO: 1781 - DNA, 224 bp, Chlorella vulgaris
gctggataggtgggcttctgcggcccgctttggaacagcgcacagcatggatagcagagcaggcaggactggaggaggaaaccaagtcgagcagctgtgaccggaacaaaggggagcaggcagctgctgcgctggctagctgtttgtcagttgaggctcaggtcagggtgtaatgaccattagagaaaaaaaaaaaaaaaaaaaaaaaaaaaaaaaaaaaacaa

SEQ ID NO: 1782 - DNA, 401 bp, Chlorella vulgaris
cccacgcgtccgggcctccctggccgcctgcggcgtgtctgacgacagccagctgtacatcctgatgcgcctgctgggtggtgccaagaagcgcaagaagaagacctacaccaagcccaagaagcagaagcacaagcacaagaagatcaagctcagggtgctcaagttctacaaggtagacgacagcggcaaggtgcagcgcctgcgcaaggtttgcccccagtgcggccccggcatcttcatggccacgcacttcaaccgcgtgtactgcggcaagtgccacctcacctacgtctatgacaaggagggagccaaggcataagcagcttgcgctcactgccctggcgggctgtggtgccgccagggaaactcttcgtctagtagggcgtgccctaaccagc

SEQ ID NO: 1783 - DNA, 405 bp, Chlorella vulgaris
ctccgactacttgggttttctacagtacccgaggcctatgggcgaaaggtgcttcttcactcagacacggctcctgccgatcgtctgacgaaccgtgcatcatgacttcgaagttccctgcacacgcaatcacaagggagcccgcgcggacgactatagtgaacagccttaaggagatgtggccctttgttgcgggcttctctctaactggctatatcttcacaaaggttgccctgtcagtgacagatgaggatgtgaagaactcaaagtttgccaaccccaagggccacagccactgagccctgaactggcaggcagctgggaagcagcgagcggcagtcctcggcggacagaccggtgtatgtgtatgcggtaatgcaacgctgcgcacggctcctccgttgc

SEQ ID NO: 1784 - DNA, 410 bp, Chlorella vulgaris
cccacgcgtccgggaaggcagtgcatctgctgaggaccgaaacggacaaccatgcagattttctgcaaaacagacaggactcatgtccttgagcttagctccgaggccactgtggccgatgtcaacgctgccatcgaggccagccagggcatcccctgcgatgcgcagcgtgtgatgttctctggtcgccagctggaggaggaggcctccctggccgcctgcggcgtgtctgacgatagccagctgtacatcctgatgcgcctgctgggtggtgccaagaagcgcatgaagatgacctacaccaagctcaagatgcagaagcacaagcacatgaagatcaagctcagggtgctcaagttctacaaggtagacgacagcggcaatgtgcagcgcctgcgcaatgtttgccc

SEQ ID NO: 1785 - DNA, 435 bp, Chlorella vulgaris
accacgcgtccggcaggctacaacaccagtggacccgcgcgtcatcgacgccatgctgccttacttgacagagcagtacggcaacccccactcccgcacccacctgtacggctgggaggctgactcagcggttgaggcggcccgggagcaggtggcaaaaattattgggtccgactctaaggagattgtgtttacgagcggcgcgaccgagtccaacaacctggccatcaagggggtggcggggttctacaaagacaagaagaagcatgtcatcaccacgcagaccgaccacaagtgtgtgctggactcgtgccgctacctgcagcagcgtggttttgacgtgacgtacctccctgtacagaagaacggcctcatcgacttgcagcagctggaggacgcgatcaggcccgacaccgccctggtgtccgtgattgc

SEQ ID NO: 1786 - DNA, 408 bp, Chlorella vulgaris
  unsure (1)..(408): unsure at all n locations
gagtcaccctggggcccctcatcacacacaaggcggtgaagggggtggaggagaaggtggctgatgctgtgcagcacggcgccaaggtggtggtaggcggcagcaagcctggctttggtggcggcagcccactgggcgggggctccttctttgagcccacagtactgacagaggtcacgcctgacatgcgggtgttccgcgaggagatctttggccctgtcacccccctctacaagttctctagcgatgaggaggcggtgaggctagccaatgccacagagtatggcctggcagcctacttctacacccaggacctgtcccgcgccttccgtgccgcggaggcccttcagtacggcatggtaggctgcaacgaggtggccatcnacagcgaggtggcgccctttggcg

SEQ ID NO: 1787 - DNA, 284 bp, Chlorella vulgaris
cccacgcgtccgagaaaaacaacaaaaacaaagaagtgaaaaggggtaaaagaaaaagtaagataaaaatgtacaacaaggcacaaagggtggtggtacgcggcaatataaaccttgctttagtctcggaagccaaaatgggcggtcggctatatcattaagggggggctcctcaaaggggtcacgctttaaaacgccggtattcggaaaaaaaatccttttaaaggtctcccccatcttgaattacaggccccttttttaaaaccgtataattgggaaaaccc

SEQ ID NO: 1788 - DNA, 357 bp, Chlorella vulgaris
  unsure (1)..(357): unsure at all n locations
cccacgcgtccggcagattttctgcaaaacagacaggactcatgtccttgagcttagctccgaggccactgtggccgatgtcaaggctgccatcgaggccagccagggcatcccctgcgatgcgcagcgtgtgatgttctctggtcgccagctggaggaggaggcctccctggccgcctgcggcgtgtctgacgacagccagctgtacatcctgatgcgcctgctgggtggtgccaagaagcgcaagaagaagacctacaccaagcccaagaagcagaagcacaagcacaagaagatcaagctcagggtgctcaagttctacaaggtanacgacagcggcaaggtgcagcgcctgcg

SEQ ID NO: 1789 - DNA, 403 bp, Chlorella vulgaris
ctcttgcattgctaggtttgtcttgagcttcgcccgacaaaatgtcgagccaacttgtgtgggagcttgtgaagcacaacaacgcattccttgtgaagggcgtgaacggcaccgtgttcagccgggaggctggtaacctgtataaccgcaactcctacaagtattctggcctggccaacttcaactccactgtggatgttgctgcggctaaggatggcggggtgcaggtgtccaagtcccgtggcaagaacgccagcaagcccagcgctgcccgtgctgtgtctgtaatcaagaataacgctcgccgcaccaactacgctgtcggcgctgaggcgcagcgcgtgcgccccgacctcaagaatgctgccgttgcccgtgcctccgccgtcaccaagagccagcg

SEQ ID NO: 1790 - DNA, 361 bp, Chlorella vulgaris
cagccttcaatcttctgctgaaaggtggtggcccagtgcccaaggaccgtctctcttctgcgcccccaagcagccaatcattcattagccggctgtggtaaccatggctcaacaagaggcggcaaaggcgctggctaacctgctgtctagggtggcacggtactccgtgctcctgggggttggaggctccgccttgcaagcttccctgtatacagttgatggcggggagcgcgccattatgtacgaccgcattcagggagtgttggagaagccagtgggtgaaggtacccacgtccggataccctggttccagacgccgcacgtgaatgataattcggacccgccctcggtccgttaactc

SEQ ID NO: 1791 - DNA, 255 bp, Chlorella vulgaris
cccacgcgtccgggcgaggatcgcatggcagcatgttcttcctaaactggttttacagcgtcctgaaatcgctggggctgtacaacaaccatgcgaaaatccttttcttgggcctggacaatgccggcaactagacgctgatgcacatgcgcaaggacgagaggcttgcacagcatcagttaaagcattatccaacctcacaggagtttcaaatgtcgggcataaacatcaacgcctttgactttagtggtcacg

SEQ ID NO: 1792 - DNA, 328 bp, Chlorella vulgaris
catccggcggcagcagcgacgatggtgctgtcatgcaacatcgctgtcctgcatcctcgccacgagttggtgaaccggaagcacaagctcaagcgccttgtatcttcgccgaaatcctagttcatggacgtcaagtgccagaggtgcatcaccagcacgaccctgttcagccactcccatacggtggtggtgtgccccacctgcaacatctgtgatgtacgtgaccacctggatgcaaagcccgcctcacagatggcggcatccttccgcaggaagggcgattaatcaggggaagcgctaagctggaatgtggtctcaagataatgct

SEQ ID NO: 1793 - DNA, 368 bp, Chlorella vulgaris
cccacgcgtccgcccacgcgtccggcgcggggcgcaagcttcgcctgcaccgccgtgaccagcggtgggcagacaaggactataagaagagccatcttggcaacgagtggaagaagcccttcgccggcgcttcccatgccaagggcatcgtgctggagaagattggcattgatgccaagcagcccaactccgctattcggaagtgcgcgcgtgtgcagctgatcaagaacggcaagaagattgccgccttcgtgccccgcgatggttgcctcaacttcatcgaggagaacgatgaggtgctcattgccggcttcggtcgtcgcggtcatgctgtgggtgatatccccggtgtgcgcttcaaggtggtg

SEQ ID NO: 1794 - DNA, 103 bp, Chlorella vulgaris
gtccgagacaagattgcgtctttggtattgcttcacccctaaccctcccctagttggaatgcgcaacttctatcaacaaatacacttccccaagtggtaaaag

SEQ ID NO: 1795 - DNA, 437 bp, Chlorella vulgaris
aggacgcgtgggcgaggcctccatgctgacgggctcgctgggcatgctgccctccgcctccatctccgacaaaggcccgggcgtgtatgagccggtgcacggctccgcgcccgacattgccggtcaggacaaggccaacccgctggccatggtgctctcggcagccatgatgtgcagatacggcctcaacctacccaaggtcgccgaccggatagaggcagctgtcacggcagcacttgatgccgacctccgcacaggagatatcatgcagccaggcaaaaagctggtcgggtgccgagagatgggggagcagctggtgaagctcctagcccggacgtccgttactgcttgaacaaagcaagcttgctgcttgctgccagtgtgctaaggcgcagccttgcgtctgtgagcaagctctgcttggactgttgcattga

SEQ ID NO: 1796 - DNA, 398 bp, Chlorella vulgaris
ctcttgcctccttttcaccatggcctctgcgttgattgccaagcccactgtggcccgcgtcttccagagccgtgcgtccaccgtgcgagccaggagcagcgtgaaggttgcagccgctgacaggcacctgtggcaccccggcgcggacgcccctgcccacctgaagggtgacgtgaccggcgacaggggctttgatccgcataaccctggaatcgaccccaagcgcctcgcatggtacactgacggttacatgatcaacggtcgctgggccatggcagccgtggacggtatcatggcccaagacctgctgggcaatggcaactggttcgaggccggtcaccacgagtactggctgctcaacgatgcgctgctggccatcgagttcctgctgctgggct

SEQ ID NO: 1797 - DNA, 408 bp, Chlorella vulgaris
  unsure (1)..(408): unsure at all n locations
cccacgcgtccgcccacgcgtccggtgatccccgtctcgcaatagttccagggcaatcactatgcaggcaaccatgatgaagaccttcggcgccagcctgcgcaaggctgtgcccacccagggcaagggcatccgccaggtgacccgcgcctccgtggagtggtacggccctgacagggccaagttcctgggccccttctctgagggctccacccccagctacctgaagggcgagttcgccggcgactacggctgggacactgctggtctgtctgccgatccccaaaccttcgctgcctaccgcgaggttgaggtcatccatgcccgctgggccatgcttggcgccctgggctgcctgacccccgagctgctgcanaacgccggcgtggccagcttccgcgacgctgc

SEQ ID NO: 1798 - DNA, 405 bp, Chlorella vulgaris
gccaccaaagccgccagaatgcagaccaccttcgtgggcaccacccaggcgctgcgcgccaaggtctccacccaggccactcgtggctccaaggtagcaacctccatgcgccgcaccgtcaagtccaagaacgtgaagaccaccgacaccagccagtggtacggtcccgaccgccccaagttcctgggccccttctccgagggtgctgtgccttcctacctgaacggcgagttcgctggtgactacggctgggacaccgccggcctgtccgccgaccccgagaccttcaagcgctaccgccagattgaggtcatccatgcccgctgggccatgcttggcgccctgggctgcatcttgcccgaggtcctgcagaggtacagcggcatcgagttcggcgaggctgtg

SEQ ID NO: 1799 - DNA, 368 bp, Chlorella vulgaris
caccaaagccgccagaatgcagaccaccttcgtgggcaccacccaggcgctgcgcgccaaggtcgccacccaggccactcgtggctccaaggtagcaacctccatgcgccgcaccgtcaagtccaagaacgtgaagaccaccgacaccagccagtggtacggtcccgaccgccccaagttcctgggccccttctccgagggtgctgtgccttcctacctgaacggcgagttcgctggtgactacggctgggacaccgccggcctgtccgccgaccccgagaccttcaagcgctaccgccagattgaggtcatccatgcccgctgggccatgcttggcgccctgcgctgcatcttgcccgacgtcctgc

SEQ ID NO: 1800 - DNA, 358 bp, Chlorella vulgaris
cccacgcgtcagcccaagcgtcagatccgtcgctggagccttccacggctgagaaggataggtcaacatggtggctgccattaagaagaggatgaattctcatgatagcatcaacgctcgtctggcgctggtgatgaagtccggcaaatttaccgtgggctacaagaccactctgaatactctgcgcatcggcaaggacaagctggtgattatcatcaagaactgcgctgctgtgcgcaagtctgagatcgagtactaggccatgctctcaaagactggcatgcaccagtacaatggcaacaatgttgagctgggtacagcctgcggcaagctgcaccgcgtgtcagtgctgacaatc

SEQ ID NO: 1801 - DNA, 403 bp, Chlorella vulgaris
cccacgcgtccggtcggagcggctggcaacatggcgaccgagattaagttgttcggcaagtggagcttcgatgaggtgaacgacatctcccttgaggactacattgccgtgaagcccaagtatgcgcgcttcaccccccactctgccggccgtttccagaagcgccgcttcaggaaggcgcagtgccccattgtcgagaggctgaccaactctctgatgatgcacgggcgcaacaacggcaagaagctgatggcggtacgcatcgtcaagcacacctttgacatcatcaacctgctcaccgaccagaaccccatccaggtcctggtggacgccatcatcaacggtggtccgcgtgaggatgccacccgcattggctccgccggtgtggtgcgccgccaggctg

SEQ ID NO: 1802 - DNA, 404 bp, Chlorella vulgaris
gtcaaagccccttcagcaaaagatccacgatgcagaccgcctttgtccgctccggcctccgtgccgccgtccccaccgctggcaagggcacccgccaggtgacccgcgcctctgtggagtggtacggccctgaccgcgccaagttcctgggtcccttcaccaaccccccctcttacctgaagggtgagttcgctggcgactacggctgggacacctctggcctgtccgctgatcccgagaccttctcccgctacagggaggttgaggtgatccatgcccggtgggccatgcttggcgccctgggctgcgtcgtgcccgagctgctggaccgcaacggcaccgtcaactttggcgagaacgccgtgtggttcaaggctggtgccgccatctttggtgatgacggg

SEQ ID NO: 1803 - DNA, 427 bp, Chlorella vulgaris
gcgcaaggaggctgcgaacaacggctacggcaccgtctaacccgcgcagctgtgcaccctgaagagctccgaccgcgtggcctccggccaggaccccaactggtacttcaaggcgcccagcgtgccgtggacatccggctggctgccgcccccagggcgccgcaggcagcagtgagccagcagtgagtcggcgtgggatgtgctgagatgcccggcgggccttggaccacggagggtagctgctcgccccccaaggccgcaggcagcagagattggttccctggagaaagattaaggcagcatgcgagctgttgaggtgggcccgaaagtggtagtactagtgcccactgtgggcggtcaccagccttcggggacagcgttggcagatgcgagtccaaagaaagaaggtttgctctgatgtttgttg

SEQ ID NO: 1804 - DNA, 405 bp, Chlorella vulgaris
agcggacgcgtggggaagtcgtgcagggctccatcgctgagttcgtttcaaccttgtaatatcagagaggggcagctatggcggctgaggcagggaagcgacaaccaagcgcgcagatgacacagttcctggtccaggaacaagccaaggcgcagttgcagcagacggtggcaaggctaacagatgaatgcttcgataagtgtgtgggcaacccagggaactacttgagctcgcgggagcaggcatgccttgacaactgctcacggcgcttcctggagaccacacaattcgtggtgaaatactttcagtccaaggcaggcggcggccgagacagtgacttccactgaagaggcctacaagctgctgggctgccacataggatttgccagcaacagcgatgccgac

SEQ ID NO: 1805 - DNA, 440 bp, Chlorella vulgaris
  unsure (1)..(440): unsure at all n locations
cccacgcgtccgcccacgcgtccgcccacgcgtccggcacaccttgttgttgtctctgccacacaacaacccgtagctatgcaggcctgcctgaccatgcagtccgccctgtgcggcaaggccaccagccaggtgttcgccgccaaggccaagaaggctgtgcgtgtgagcaccgttgtgcgcgccgaggcagcgcccgctactgaggagaagaaggcctgggcgcctcccaccctgaaccccgccaccccctcccccatcttcggtggcagcaccggcggtctactgaggaaggcgcaggaggaggagttccacgtgatcacctgggagtccaagaaggagcagatttttgagatgcccaccggcggcgctgccatcatgcgccagggccccaacctgctcaagctgtcncgcaaggagcagtgcatggccctactgac

SEQ ID NO: 1806 - DNA, 409 bp, Chlorella vulgaris
gctcctgcagccttgctggcttgaacccctttcccaagtaccagcactagcatcatgcagacagccctccgctccaccctcttcaccgcccgccctgcgcaggtgcgccgctctgtggcagtgaatgccaagagccccggcacccccgcttgggcacctgagcggcccctttggctgcccggtaccactccccctgcccacctcgatggcaccctggttggtgactttggctttgaccccctgaacctgggcgcgaaccccaaggcccttgagcggtatgtgcaggctgagctgcagaatggccgctgggccatgcttggcgtggcaggcatgatcttccccgagctgctcacccgcgccggcatcttcactgcccccaactggtacgaggcgggcaaggtgtctgctg

SEQ ID NO: 1807 - DNA, 389 bp, Chlorella vulgaris
agggcctgtccgccgatcccgagaccttctcccgctacagggaggttgaggtgatccatgcccggtgggccatgcttggcgcccttggctgggtcgtgcccgaactggtggaccgcaacggcaccgtcaactttggcgagaacgccgtgtggttcaaggccggtgccgccatcttcggcgatgacgggctgaactacctgggcaacccctccctcatccacgcacagtccatcgtggccgtgctgctctcccagattgtgctcatgggcctggttgagggctaccgcgtgaacggcggccccgctggcgagggccttgacgccctgtaccccggcgaggcctttgaccccctgggcctggccgacgaccccgacagcttcgctgagctc

SEQ ID NO: 1808 - DNA, 406 bp, Chlorella vulgaris
agtgcctgcttacctcagcattcattggcatggtgtttacaatccagttcatcagggagttcgccaagctagggctgacaaggtcagtgggaggcgtgctgggattagcactttcccgagagttgacgccggttgtcacttgcatcattttggcagggcgcgtgggcagcgcctttgcggcggagcttggcaccatgcaagtgtctgagcagacagactccttgagggttttgggaagcgaccctgtggattacctcatcagcccccgagtcctggcgtgtatggttgctgcgcccatccttaatgtcaagttgcttctgcatgggcatggctgcgagctgcaccccttgctgaggtggtgtacggcgtcagctgcaacgtgatcctggactcagcgtgcaaagcg

SEQ ID NO: 1809 - DNA, 135 bp, Chlorella vulgaris
aggcctcctgctgtgctgacaaaggggcaaaccggcaattataacccttaaggccccctgggcaattcatgcgccacttgggctcctcccaaccgcaagcattgctgtggtgtcaaggcgaccaaaaacctcacc

SEQ ID NO: 1810 - DNA, 381 bp, Chlorella vulgaris
ggtggccaggccccaaacatttacttaaagatgtcggccgccgctcagaccgtgcctgaggctgtcttgaagaagaggcggagggatgaggagtgggcagcaaagaaggctgctgacgctgctgaggccagcaagaaggccagggctacccgcaaggagatcttcaagcgggcggagcagtatgtgaagcagtaccgtgcacaggaggcggacctgatccgactcaagcggtctgccaagtccaagggcggcttttatgtggagccggaggccaagctgttgtttgtggtgcgcatccgcggtatgaacgacgtggcgcccaagaccaagaagatcctgcagctgctgcgcctgcgccagatccacaacggagtcttcctc

SEQ ID NO: 1811 - DNA, 294 bp, Chlorella vulgaris
cccacgcgtccgcccacgcgtccgcccacgcgtccgcccacgcgtccgcccacgcgtccgcggacgcgtgggctgaggcaagccgggaatcgagttggccttgagccgacgcgtttgacgcccgcagcagcacctaacacacgcaccaggcaccatgctcatctccaagaagaacaggcgtgaggtgtacaagttcctcttcaaggagggtgtgctgtacgcggagaaggacttcaacctgccggagcaccccgagattgagggggtgtccaacctggaggtcatcaagctgat

SEQ ID NO: 1812 - DNA, 222 bp, Chlorella vulgaris
gcctcacctggacatccttcagtctcaaaccagctttccacattgcttcccaatgtctcatctctggcaccatggcccgcaagttcttcgtcgggggcaactggaaatgcaacggtactgtgaagagcaacgccgatctggtaaagaacctgaacgatgcaacggtcccaggaactgatgtcgtggaggttgttgtggcccccgcacctgtgcacatcaccc

SEQ ID NO: 1813 - DNA, 236 bp, Chlorella vulgaris
  unsure (1)..(236): unsure at all n locations
cccacgcgtccgcggacgcgtggggtcgggttggagctgtgcataagtgtgcaggaggaggcgctgagcggcagcgcgtcaccagcggaggcaggtcatgctgtgcacgatcggtttggacgtcttgaaaacagggtggaggcttggcagcagcagcacgggcgtagtttnggnnaaacctacgcagcntgctgcgcttcgctgcgccctccccctgtccatctcgtgccgtccgt

SEQ ID NO: 1814 - DNA, 341 bp, Chlorella vulgaris
tccgagcaactatcgcgaggcgctgcgggagctgctgcttgactacgcggatggcgcggacgtcgtgatggtcaaccctggcttgccctaccttgacgtgcatcgcctcttgcgggagatcgccccccttgccatcacggccgacgatgtgtctcggcagtagcccaggctcaacgcggccgctgagcctggctggctcaacgagatggagtccgtgctggaggcgctcatccgcttgaaccgggccggctctgacttcatactcacgtattacgccacccacgcagcccagtgcgatgccggcgacctctgacgcccccccctcgccccctcggccccct

SEQ ID NO: 1815 - DNA, 212 bp, Chlorella vulgaris
agcgggtagccagacgcataggctacaggcagccgcccggacaacgagcggcagctagcaccgacaagctacatcatggcggtcggcaagaacaagcgcctgtccaagggcaagaagggtggcaagaagaagattgtggaccccttcagcaagaaggactggtatgacatcaaggcacccagcgccttcaatacccgcaatgtgggcaagac

SEQ ID NO: 1816 - DNA, 407 bp, Chlorella vulgaris
cccacgcgtccgaccggcccttacatcaagatgggtcgtgtcatccgcgcccagcgtaagggtcgtgggtcggtgttcaagtcccacaacacccacaggaagggcgcagccaagctgcgcgtcctggacgccgcagagcgcaatggctacatcaagggcgtgattagcgacatcatccacgaccccggccgtggcgcacccctggccaaggtgactttccgccacacccacaggtacaagcacgacaaggagctgttcatcgcccccgagggtgtgttctctggccagtacatctactgcggcaagaaagccaccctgaccattggcaatgtgaagcccgtgggcgacatgcccgacggttacatcgtgtgcaacgtggaggagaaggctggcgaccgcggctcact

SEQ ID NO: 1817 - DNA, 257 bp, Chlorella vulgaris
tcaaagactgtcagccctggctactatgacaatcgatactggacaatgtacaagctgcccatgtttgggatcagagatccagaccaagtgctgcgggagattaacgagtgccagtcccagttccccacagcttttatccgcctggtggcttttgacgacctgcggcaggttcagattacaaatttcctgctgcatcggccgcctactccagacacccgctccagcttcagctccatgtggcaccagtacagtgtgac

SEQ ID NO: 1818 - DNA, 281 bp, Chlorella vulgaris
aaaaaaaaacaaaaaaaaaaaaaaaaaaaacaaaaaaaaaaaaaaataaaaagaaactgcaagcgtatgcttctggcacccttgcccgggtcggaaccatcaaaagggaggcaaatctcaccaataaatggtatatcgcctgtgtctctcttcaagtcaaccaggataatctacagcagcatctactggtagcatggcagctcctaatcctgccgtggacgtgggcgctcatcccactggacgattgcccgtctcaacgcttgctctaacttactcaagcc

SEQ ID NO: 1819 - DNA, 394 bp, Chlorella vulgaris
gcaggaaggaaccgcctgcgccgtggatggtgctagcatggggtgtgtggggctgtgcagtagtaacgtcttagaaggggggataggttgtgacaccttgatgactgtcgctgtgccaagttctcgtttggaccactgtcacacacatgcacactcgcctgtgtggggcccgcgtgtgtgcctctgcccccacataaagctgggctggggtgcaagttacggataacagcaattcttttgtagtcggcctgctgccacacgtcttcttctgttcacgaacatgtggataaaattgctttgatgatacctatgccattcgaacttctatgcactgcctcctgtaaccactggtcgaaaaaaaaaataaaaaaaaaaaaaaaaaaaaaaaaataaa

SEQ ID NO: 1820 - DNA, 403 bp, Chlorella vulgaris
gatccccgtctcgcaatagttccagggcaatcactatgcaggcaaccatgatgaataccttcggcgccagcctgcgcaaggctgtgcccacccagggcaagggcacccgccaggtgacccgcgcctccgtggagtggtacggccctgacagggccaagttcctgggccccttctctgagggctccacccccagctacctgaagggcgagttcgccggcgactacggctgggacactgctggtctgtctgccgatccccaaaccttcgctgcctaccgcgaggttgaggtcatccatgcccgctgggccatgcttggcgccctgggctgcctgacccccgagctgctgcagaacgccggcgtggccagcttcggcgacgctgctgtgtggttcaaggctggtgc

SEQ ID NO: 1821 - DNA, 333 bp, Chlorella vulgaris
cccatccctccatacttccagggcagtcactatgcaggcagccatgatgagtaccttcggcgccagcctgcgcacggcagtgcccacccagggcatgggcacccgccaggtgccccgcgcccccgtggactgctgcggcccagacagggccacgttcctgagaggcttctctaagggggccagtgtaaactccgcccatgtttgggatgacagatccagaccatgtgctgccggagattaacgagtggctgctccaattctccagagcttttacccgcctggggcatttaggccagctgggccatgcttagagcactgggctgcctgaccccc

SEQ ID NO: 1822 - DNA, 426 bp, Chlorella vulgaris
  unsure (1)..(426): unsure at all n locations
cccacgcgtccgcccacgcgtccggtactcgggacgggcccgagaggaggtcaggctcatgggtgacagtcgtgagattctaaacaccctggccactgacgaacggtgggcaggcacccagatagcgtacgtgagtcggacggagtatccagagtgggcagaccaatgcctgcagctgtttgagctggagtgcgggacaaacctgcatacgttgggggtacatcatgagatctaccctgggtcaaaacgcacccactttcgggagatccatgcccgcagcggcattgactaccacgactgcatcttctttgacaacgagaggtggaactgcacggtaagcctacggcggcagcccaggtatgtggccaactggctagagctccgtanggcgtaaggcggggtctccagcccgtcaacaacttctgc

SEQ ID NO: 1823 - DNA, 423 bp, Chlorella vulgaris
accacgcgtctggtccaagccccttcagcaaaagatccacgatgcagaccgcctttgtccgctccggcctccgtgccgccgtccccaccgctggcaagggcacccgccaggtgacccgcgcctctgtggagtggtacggccctgatcgcgccaagttcctgagtcccttcaccaaccccccctcttacctgaagggtgagttcgctggcgactacggctgggacacctctggcctgtccgctgatcccgagaccttctcgcgctacagggaggttgaggtgatccatgcccggtgggccatgcttggcgccctgggctgcgtcgtgcccgagctgctggaccgcaacggcaccgtcaactttggcgagaacgccgtgtggttcaaggctggtgccgccatccttggtgatgacgggctcaact

SEQ ID NO: 1824 - DNA, 429 bp, Chlorella vulgaris
acatcttcggcgatgatggcctgaactacctgggcaacccctccctggtccatgcccagtccatcgtggccaccctggccgtgcaggtcatcctcatggctcaggctgaggctttccgtgtgagcggcactgccccctggagcggcgaggagctcgacaccctgtaccccggtgatgcctttgacccccttgggctggctgacgaccccgacacctttgctgagctcaaggtcaaggagatcaagaacggccgcctggctatgttctccatgttcggcttcttcatccaggcacttgtgaccggcaagtctcccctggagaacctggccgaccacctggctgaccccgcctccaacaacggcttctccatcctgaccgccaccaagttcaccccctgaattcagccctgaattttgagggaaatcccct

SEQ ID NO: 1825 - DNA, 431 bp, Chlorella vulgaris
gctacggaagggatgatggcctgaactacctgggcaacccctccctggtccatgcccagtccatcgtggccaccctggccgtgcaggtcatcctcatggctcaggctgaggctttccgtgtgagcgggactgccccctggagcggcgaggagctcgacaccctgtaccccggtgatgcctttgacccccttggcctggctgacgaccccgacacctttgctgagctcaaggtcaaggagatcaagaacggccgcctggctatgttctccatgttcggcttcttcatccaggcacttgtgaccggcaagtctcccctggagaacctggccgaccacctggctgaccccgcctccaacaacggcttctccatcctgaccgccaccaagttcacccccgtgaattcagccctgaatttggcgggaaatcccctg

SEQ ID NO: 1826 - DNA, 416 bp, Chlorella vulgaris
accacgcgtccggaagaagcgctgtgcttgatgctggcttattggctggccagcatcaaagcacggctgcatcttaccaagcgcgagcatgctggcttggttcctgacctgtcttagggtttgagatgtctttgcacttttgtttagcagttactttggcttttgcattcgtgtgcagctgctgtgtctgtccaagcattgataaatgccgcctgctgctgtgcccgcaagactgctcgattggtttcaagtccctaatttctgtgctaatactttctcttccttagtaattaaggcgtatctgcctttgctttcatgtctacgtcctcatgttcatgtcatgcattcagtgattcgctggctggtggtcatgccttcgagctcaagctgtcgcaactacttgttcgtgcagtgac

SEQ ID NO: 1827 - DNA, 419 bp, Chlorella vulgaris
atggaaccacctgtcgacaagaggtccaaggttcacaagatgcagaccctctctgcccgtttcggcgtcagcgcccctgtctcccggggcacccgccaggtgagccgcgcctccgtggagtggtaaggccccgaccgcgccaagttcctggggcccttcatcaaccccccttcctaactgaagggtgacttcgctggcgactacggatgcgacacctctggcctgtccgacgatcccgaaactttctcccgcatacagggaggtctaggtgatccatgcccggtgggtcatgcttggcgcccttggctgcatcatgcccgaactgctgcagcgcaacggtaccgtcaactttggcgataacacggtgtggatcaaggcgggtgccgccatcttcggcgatgaccggctgaactacctgg

SEQ ID NO: 1828 - DNA, 404 bp, Chlorella vulgaris
tggcactaaccgtcaacatgccgaagacggtcgtggttgattgccggggccatatgcttggccggctggcgagcatcctcgccaagcagctgctcagcgggcagaatgttgtctgcgtgcgctgcgaggagatcaacatctctggcggcatggtcaggcagaaaatgaagtatgagcgcttcctgaacaagcgcatggttaccaaccccaggagggctgcctacaggttcagggcacccgcccgcatcctgtggaggactgtccgcggcatgatccctcacaagaccccccgcggcgcagcagccctggaccgcctcaaggcctttgagggtgtgccccacccctacgacaaggtgaagcgtctggtgatccccgatgcgctgcgcgtgctccgcctgcagcac

SEQ ID NO: 1829 - DNA, 416 bp, Chlorella vulgaris
ttcagttattgtcgcatgctgcaagggcgatgcatgccgcgcgcatgtgctagtcttcccatcaacctattgtacagcacttagccttcgaactgagcaacctacatagacttgtatcgcagcaacacactcctgcgcgctggggcagcgtaagggggcaccatggcctccacagagcgggacaagctatggatgttcagcccaatcacgggacagttcctgcaattgaaggctgctgagggcaaggcggtctgcccagcctctggttatgctctggacctctccactgtggatgacaccaacatggtccgcgaggagacagtcatgcgggactacctgaaagcctttggcatggagccgcttgtgaagtcgaaggagtggcacgaaaacgacgagctgctgaaccccaatcagag

SEQ ID NO: 1830 - DNA, 406 bp, Chlorella vulgaris
gttgagcggcttcacaatgtcgaagcggaccaagaaggtcggcattgtgggcaagtacgggactcgctatggtgcgagtctgcgtaagcagattaagaagattgaggtcagccagcattccaagtacttctgcaccttctgcggcaagttctccatgaagcgccaggctgtcggcatttggcagtgcaaggcctgcaagaagacccttgctggtggcgcctacgtgtgcaacaccgccgccgccgtgactgtccgctccaccatccgccgtctccgcgagcagattgagaagtaagcagccaaacccagaaaggcagccgctacatcagcagcagcccaaccactagcccagcgtgcaggcgccgtggatgccagtatttttggggcgccgacaatgacagccttg

SEQ ID NO: 1831 - DNA, 394 bp, Chlorella vulgaris
ctagctcacttgtcatctactgctggctaatctcgtgagcctttcggaaaagggattcatccctcaccaaccttgtcggtgaaggggtatctggggaagacataacccgtcccgcagagatgcacgcggcagtgtcgaaagtgatcctacttgcgttcctagcctccatctatcctatcaaggcccaaaccccagaggttgttctctacggcgaagcgctgtgcccttacacaatagcagctgtcaaggacgtgatacgccctctctttgatggtgggctggccgggcgcttcacgtttcgatatgtggcctatggcaatgcccggacatcctcggcgggagtgacctgccagcatggccccgcagagtgccggttgaatcgggttatcaactg

SEQ ID NO: 1832 - DNA, 99 bp, Chlorella vulgaris
ctgcccctgccgctgccgctgagctgccaaacgtaagcaaggttgacatccgtgtgggcaagattttgaagtgtgaggcgcaccccgatgccgacagct

SEQ ID NO: 1833 - DNA, 334 bp, Chlorella vulgaris
ggcatgcgatgcaacacaggggagagcggtagtgataggccgcatgcactgtgctctgggtattgcagggggtgtacacccaccgtactgcgaggcggatcggaggcaaagctgcgtatcagcgacaagcctgggaagattttggttgcaaagcccaaccgacactctgggatttgcctgagttctgactcataggtcttgcctcgaatgtatatgctttacttgctccagaccgggtttgtatggtcggttgtaactgtcaggtcaagagcccaaactgatgccgtacctggccacagaccccggcgcaacacaaaatcactggccacacctt

SEQ ID NO: 1834 - DNA, 425 bp, Chlorella vulgaris
gcacaacagaacccaaacagcgcagggcccgggggtgtctggacacctgcacagccacttttcagctacctctttgccatcaccagcgccattacctatacggcctggaatgtgtcagggggcgaccttgggaactacgttctgctgtcccccgcccggctcctgatgggcagcctgctgcacttcccggaggggccgctcacaggctggtggtccctcgggcgcatcctcaccaccacattcctcccctacgacgcctttcccgggctggcgtgcagcctcctgctagtcacagcaggggcggaggcggagcgggtcctgggcagaggccgctttgcgctcattttcctgctcgccggggcagccaagagcgtggcattcctgggcgacgctgccacctgggactggtacccagacctggagga

SEQ ID NO: 1835 - DNA, 380 bp, Chlorella vulgaris
gtcggccaacatggttagccgtctgagcaagaaccgcaagaagcgcggtcatgtcagcgccggccatgggcgtatcggcaagcacaggaagcaccccggtggccgcggtaacgccggtggccagcaccatcacaggattatgatggacaagtaccaccctgggtactttggcaaggtgggcatgcgctacttcaacctgaagaagaacaagttccactgccccatcgtcaaccttgacaagctgtggagccttgtgggcgaggaggctcgtgttgaggcctccaaggactcgagcagcgctgccgtgattgatgtcaccaagtatggcatccttcaagtgctgggcaagggcgagctcccgcagcacccagtggtggtga

SEQ ID NO: 1836 - DNA, 415 bp, Chlorella vulgaris
aatgggtgctgttagctcaaacggtgattgtgtgtggcaaatcagtgttgagacagggttacttggcacgttaaatggctacccgtaactggctatggctgtatcctgcttgcgaagttcatgcattgtgctctacggctttggtgcttttcctccagctgaaatcccttatccatatgcctctccttgccttgatattgtggcaaggtttgtggtgtcgaaacattgtggtacacctacaccctccatgacttattgagggtggcaggtaatgcgatgagagagaacgtacaggtatactgggctgatacgggtgtatgcagctatgctcttttgagtgacgctctcgtcgcctgcgtcctactgcgcgccaagctgggctgcgctttgcttgggtggcatacactgtgctatg

SEQ ID NO: 1837 - DNA, 407 bp, Chlorella vulgaris
aaaaaaaaaaaaaaaaaaaaaaaaaaaaaaaaaaaaaaaaaaataaaaaaaaaaaaaaaaaaaaaaaaaaaaaaattcaaagaaaataaaaaaaaaaatcaaaaaagtataaaaataaaacaacactaaaaactaattaaaaaaagaaaaaaaaagggggggtcccctatagggtttcaaatttttattcctgatgaggtgaataatgagcccttctaagggggccgctaatttaatttcaggggtgctttttttaaaatcctggacatggaaaaacccggggtttacccaatttaacccctttgtgataaaccccctttttccaagtgggggttaaccttaaagtggcctacctattcgcactctccaaatttttccccccctaatgggcataggtgaccccccct

SEQ ID NO: 1838 - DNA, 358 bp, Chlorella vulgaris
aatcccccgtcgacaacaggtccaaggttcacaaaatgcaaaccctctctgcccgtttcggcgtccgcgcccctgtctcccggggcacccgccaagtgacccgcgcctccgtggatctggaactgccccgatagctccaagttcctgtgccccctcaccaacgccccttcctacctgaagggtgaattcactgtgtactactgctgggacacctcaggcctgtcctccgatcccgagatattccctcgctatacggaggttgaagtgatccatgcgcggtgggacatgcttggcacccttggctgcgtcgtgcccgagctgctggaccgcaacggcaccgtcaactttggcgagaacg

SEQ ID NO: 1839 - DNA, 356 bp, Chlorella vulgaris
aacatgcgtccggaaatctgccttaaggatctgcaggacgacttcatgggtggcgccgagatctgcgtgtctgagcccgtggtgtccttcagcgagaccgtcatcggcacctctgaccacgtggtcatgtccatgtcgctcatcaaggacaactgcctgtacatgcaggtgcgtggcatggtggacggactggcagatgccattgatgaaggcaagattgggccccgcgacgacgccaaggtgcgctccatagatatgtctgaggagtttggctgggataaggagctgggcaagaacatctgggcctttggccccgacaccaccggccccaacatggtgaccgatatcaccagggg

SEQ ID NO: 1840 - DNA, 431 bp, Chlorella vulgaris
cctgctcctgtgtggtagctccccgccccgttgctcatcatgtctgctctctcgacctgccgggctgccaccaccagcgtccatcagcgcgctaaaggccttgccagcatgcaccgttccatctctagccttcttagggttgctgcaccattgaggaccagccgcgccgcgtcaaaggctgcgtgcgtctctttgcacgccagtgttaatgccgcggcggtagaggaggttgccaccccccctatgtcggtacggccagcccgaggaggtggctagcctggtgcggtacctggccctagaccccggcgcagcatatatcactggccagaccttcgctatcgatggtggcatgaccatgtgctaaacaagcgcccatggcctgcgcagccgcttggctggggcagcgccagcttggtgactaggtcccctat

SEQ ID NO: 1841 - DNA, 402 bp, Chlorella vulgaris
gtgctggcgtatccccgcagtaagagtgccaggccttgccaacttggcaagggtggcaggggcgtcggcttcagctggctgggtgactgtacatgtgcaccttgttggtgcacactcacgggcgtcacctccagttgcagataagttgatgatgcagtgaggtccgtctgacacccatgaaccccagccccaaatcgaaccccggccgatatactagctgggcggcttggagtaggcgcccaagttgaggattcaagtctccatatccatgaaagcgagggctagcgggccatgtgatgaaggggtggcggccagctagcagcgctcgaatggtgcatgccatcaaaccggtcactgtcagtgtgtcaatcctagctgtgatttcaagaaccaaggtcgttc

SEQ ID NO: 1842 - DNA, 435 bp, Chlorella vulgaris
accacgcgtccgcccacgcgtccgggatgccgccaatgtgggcgacgagggaggcttcgcccccagcatccagtccaacgaggagggtgccgagctgatcaagcaggctatcgaggcggccggccacaccggcaaggtcaagatggccatggactgcgcggcctctgagttctatgagcccaaggacaatgacggcaagtacgacctgctgttcaaggccaaggacaacgacggctccggcaagaggaccggcgaggagctgtctcagatgtaccaggacctgtgcgccaaataccccatcatctctatcgaggaccccttcaacgatgacgattgggactcctatggcaagttcaccgagctgggcctggcccacgtggtgggcgatgacctgctgtgcaccaaccccgtgcgcgtgcagaacgccatcgacaa

SEQ ID NO: 1843 - DNA, 428 bp, Chlorella vulgaris
cccacgcgtccgcatggcttcaaaaaggaagggcggcgttggtggcaacaagttcaggatgtcgctgggtttgccagtggccgcaacaatcaactgcgctgacaactccggcgccaagaacctgtacatcatctccgtggccggctggggcgccaggctgaaccgcctgcccgccgccgcccccggcgacatggtgatggccaccgtgaagaagggcaagcctgacctccgcaagaaggtgcaccctgcggtggtggtgcggcagcgcaagtcctggaggcggaaggacggcacctacatctactttgaggacaatgcaggcgtcattgtgaaccccaagggcgagatgaagggctccgctattaccggccccgtggcaaaggagtgcgccgacctgtggcctcgtgttgctgccgctgccaacacca

SEQ ID NO: 1844 - DNA, 407 bp, Chlorella vulgaris
accacgcgtccgcataggcttaggcgggaacgtcggtgttggtggcaacagcttcacgatgtcactgggtttgccaatgtgacgcagcagtcaaatgcactgacaaatcttgcgcgaagaacctgtacatcagctccgtggacgactggagcactatgcttaaacgtgtgtgagccgcggcaccaggaaacatagttatggtgaccgtaacgaatggcacacctgacatccacattaaggtgtaccctgcagtggtggtgcggtatcacacgtcctgaaggccggaggacggaaccgacatctactttgtggacgatgcaggcgtcattgtcaacttcaaggccgacataaagggctcggctattaccggccccgtggaaaaggactgcgccgacctgtggacacgt

SEQ ID NO: 1845 - DNA, 366 bp, Chlorella vulgaris
cccacgcgtccgcccacgcgtccggtgaaacatggcacccaagaagaaggttgcggcccctcctgccgcggtcaggaatgccgctcagccggccaagcccgtgaaccccctgtatgagaagaggccgaagaccttcggaatcggtggtgccctgcaacccaagaccgaccttcaccgctttgtgaattggcccaattatttgcgcatccaaaggcaaaagcttgtgctcaaccagcgtctcaaggtgccccccgcactgaaccgcttcacccgcacgctggacaagaacatggccgaaagcctgttcaagctgctgctcaagtaccgccccgaggacaaggcagccaagaagcagcggctgctggc

SEQ ID NO: 1846 - DNA, 307 bp, Chlorella vulgaris
gcgggcacttggactgcaaccatgccgaagcagattgaggagatcaaggagtttctcctcaccgccaggcgcaaggatgcccggtctgtgaagatcaagaagaccggcgatgtgaccaagttcaaggtccgctgctcacgggaactggtaaacccccggcttaacgaatcccaaaagggaaaacaactcaaacaatccctggcgccccggctggaatttcaaggaattcgaaaaattgaatcctttgaacaattaagaattacccaatcaacaaaagggcggaagtgtcaacccccccaacttttcc

SEQ ID NO: 1847 - DNA, 402 bp, Chlorella vulgaris
ggttggtggaagggggagagccgcaaaaatggcgtcggacaagaaggctcagaaccccatgcgcgagatccgcgtcgcaaagctcatcctcaactgctgcaccggcgagtctggtgatcgcctgcagaaggcggcaaaggtgcttgagcagctgaccgggcagcagcctgtgtttggcaaggcccgctacaccgttcgccagtgggccatccgccgtaacgagaagatctcctgccacgtcaccgtgcgcggggagaaggccgtgcagctgctggaggccgggctcaaggttcgggagtacgagctgcttcgtcgcaacttctctgacagcggcaactttggctttggcatcaatgagcacattgacctgggcatcaagtacgacccctccaccggcatcta

SEQ ID NO: 1848 - DNA, 387 bp, Chlorella vulgaris
acacacgcctctagattgagtcgtaggagacagccgcacagatggggtcggccaagaaggctcacaaccccatgcgcgagatccgcgtctcaaagctcatcctcaactgctgcaccggcgagtctggtgatcgcctgcagaaggcggcacaggtgcttgagcagctgaccgggcaggattctgtgtttggcaacgcccgctacaccgttcgccattgggccatccgccgtaaccagaatatctcctgccacgtcaccgtgcgcggggagaaggccgtgcacctgtcggaggcccagctcaatgttctggactacgagctgcttcgccacaacttctccgacagcggcaactttgcctttggcatcaatgatcacactgcgcctgggc

SEQ ID NO: 1849 - DNA, 205 bp, Chlorella vulgaris
aactcgtccacaacaggtccaaggttcacaagatgcagaccctctctgcccgtttcggcgtccgcgcacctgtctcccggggcacccgccaggtgacccgcgcctccgtggagtggtacggccccgaccggccaaagtgcctgggccccttaacaacccccctttctaacttaacggttaatttcctcgccaataccggtgggaa

SEQ ID NO: 1850 - DNA, 429 bp, Chlorella vulgaris
ggcgtctcccctggaagtcgtttgctacgaggaagcaaaggaaagatgaaggttagcctcgtagtttgcctgctcctggccagcgcccttgcagtcacggccatcccatctcccaagtccttctgcggagtcagtggtacaacgctgggcggctggaccgtggtggagggtgtcaactccaccgacgtggtgtctgggagctacacctacgaggagctgatggggatggcggtggaggagtgggaggccaccagcggcaacaccctgccctgtaccgaccccctgttcacccccgagatcgtttgcagccaggtcgttgctggtgtgaactacaagatctacttcactgctgagtgtgaggatgccgcccccgtcgactttgaggctgccatcttcgtgcccctgtactccaacccagctggcaccgag

SEQ ID NO: 1851 - DNA, 426 bp, Chlorella vulgaris
cccacgcgtccgcccacgcgtccgcccacgcgtccggctgcggacagtggattagcaaagatggcgaccgcaatgctgaacgccaaggccaccagctttgctgcggctaagaccgcccctaggtcccgtgcggcccgcctggtggtccgtgctgccgctgtccccgccgaggtcccggacatgaacaagcgtgtcctgatgaactggctgctggcgggcgccatcggtgctcccactgtcggccttgccgtgccttatgccctcttctttgtgccccccaagagtggcggcggtggctctggtgaggtcgccaaggatgctctgggcaacgatgtcaaggccaccacctggcttgccacccaccagcccggtgacaggtccctttcacagggccttaagggcgatgccacctacctcatcgtgaat

SEQ ID NO: 1852 - DNA, 429 bp, Chlorella vulgaris
gccagtcgactcggagcaccatggcagcgatggcttccctgaccgccaggaccgccttcgtgggcaagacccactcccagccccgccaggcggcgaggaggagcagcgtggttgtggctgccagcaggcccatctggtaccctggcaacgatgaggtggtgcccccttacctcgacggcgagctgccaggcgactacggctttgaccccctgcgcctggctgacgaccccgagaaccgcaggtggttggtccactccgagatcttccacggccgcgtggccatgaccggcgttgcgggcatcctgtacacctcgctggccaatgcctccggccaggacatccccgagtggtttgatgccggcaaggtgtacgctgagacccaccccgatgtgccctttggcgccctggtgtacaccaccttcctgctga

SEQ ID NO: 1853 - DNA, 434 bp, Chlorella vulgaris
gggtgatgtgctggccggccgcgtggagcagggcattgtcaagcccggtgacgaggttatcttcctgcccacccacaccgccgccaacccctgcatcggcaaggtcttcaccgtggagatgcaccacaagcgcgtggacaaggccggacccggcgacaacgtcggcatgaacgtcaagggcctggacaagggcaacatgccccgcaccggtgacgtgatgatcctcaagtctgacggcaccctgaagcctgtgaaggacttcaccgcccagatccagaccctggacatccccggcgaggtcaaggccggctactcccccatcggctttgtgcggtgtggccgcgccgcctgcaggatctccaagatcaactggaaggttggcaaggagactggtggcaagaagctggaggagccccacgggctcaaggccaacg

SEQ ID NO: 1854 - DNA, 412 bp, Chlorella vulgaris
gtggaatctcccgtcgacaacaggtccaaggttcacaagatgcagaccctctctgcccgtttcggcgtccgcgcccctgtctcccggggcacccgccaggtgacccgcgcctccgtggagtggtacggccccgaccgcgccaagttcctgggccccttcaccaaccccccttcctacctgaagggtgagttcgctggcgactacggctgggacacctctggcctgtccgccgatcccgagaccttctcccgctacagggaggttgaggtgatccatgcccggtgggccatgcttggcgcccttggctgcgtcgtgcccgagctgctggaccgcaacggcaccgtcaactttggcgagaacgccgtgtggttcaaggccggtgccgccatcttcggcgatgacgggctgaact

SEQ ID NO: 1855 - DNA, 412 bp, Chlorella vulgaris
  unsure (1)..(412): unsure at all n locations
aggacacggaccagttcctgacggatgccaagacagcaaccttagtcatggaagtgatcctgaagcagggaggcctggctccagggggcatcaactttgatgccaagctgcggcgtgaatccatttctctggaggacctgttctacggccacatcagcggcatggatgccatggcacgagggctccggaacgctgccaggatgatcgaggagggcgagctggacaagatgcgccgcgagcggtacagctcgtactttgacgaccgcatcggcagggacattgtggacgagcgtgccgatttccgccagctggaggcgcatgccatgtcacagtacgaccctgngctgaacattaccagcggccaggcagagctgtacgacctgtgggtggcgcactacctgcgctgaaactg

SEQ ID NO: 1856 - DNA, 365 bp, Chlorella vulgaris
gatccccgtctcgcaatagttccagggcaatcactatgcaggcaaccatgatgaagaccttcggcgccagcctgcgcaaggctgtgcccacccagggcaagggcacccgccaggtgacccgcgcctccgtggagtggtacggccctgacagggccaagttcctgggccccttctctgagggctccacccccagctacctgaagggcgagttcgccggcgactacggctgggacactgctggtctgtctgccgatccccaaaccttcgctgcctaccgcgaggttgaggtcatccatgcccgctgggccatgcttggcgccctgggctgcctgacccccgagctgctgcataacgccggcgtggcc

SEQ ID NO: 1857 - DNA, 403 bp, Chlorella vulgaris
tggaccttaaacacgattggttatggactgtgtggtgctgggagcgagttgagtttactcctcctgtgtgcactggggctccctaatcccaatccccatgtgcactggttggacgggttttgggagtttcccgtctgacacccatgcaccccagccccagatcgaaccccggccgatatactagctgggcggcttggagttaaggcgcccaagttgaggattcaagcctccatatccatgaaagcgagggctagcgagccatgtgatgaaggggtggcggccagctagcagcgctcgagtggtgcatgccattaaaccggtcactgtcagtgtgtcaatcctagctgtgatttcaagacccaaggtcgttccattgtggtgggaatccagtggttcagcctgc

SEQ ID NO: 1858 - DNA, 385 bp, Chlorella vulgaris
acgatggccaaaatcaaggcccatgagctgcggaccaagagcaaggccgacttgctggcccagctgaaggaccttaagcaggagctgggtgcgctgcgtgtcgccaaggtcactggcggtgcccccaacaagctctccaagatcaaggtggtgcggaagtccatcgcccgcgtgttgaccgtggtcaaccagaccacccgcagcaagctcagggaggaggttgccggcaagaagtacgtgcccctggacctgcgcgtgaagaagacccgcgccatgcgcagggcgcttaccaagcatgagaggaccgtccggactgagaagcagaagaagaaggacgcagccttcccccgccggaagttcgctgtcaaggcctgagcagcgcctt

SEQ ID NO: 1859 - DNA, 424 bp, Chlorella vulgaris
aggacgcgtgggcggacgcgtgggcggacgcgtgggccgctgtttctgaatcccatagatttggcttcctaagcagcatgtcgtcccttgtgtccaagcccgtggtggttgccaggcccagccaggtggcccggcgcccactagctgcccaggctaagccccgcctggtgtttgtcagggggaccggcccggataagtctgcgattcaggaggctattaaggacgccgaggagacgtgcgctggtggtaacactggcgagtgcgctgccgcctgggacaccgttgaggagctgtccgccgctgcctcccatgcaaaggatgctgcaaaggccaacccctcttctgtcgacccccttgagaagtactgcgaggaccagcccgacgcggacgagtgcagggtgtttgacgactgaagctacggctt

SEQ ID NO: 1860 - DNA, 431 bp, Chlorella vulgaris
ccctgggagggcatgttgacgacgctgagcacgatctggaccagcccatcgtgacgatcagccttggctgcgaggcagtcttccttgctggagggctgaccaaggacgtgcccccgctggcgctgctgctgcggagtggggatgcagtggtgctggcaggggccgcgcggcggtgctaccatggcgtgccacggatcctgactgacaggccgctccccccagggctggcaggagctgggaggtggaggagtgcggaggaagggcaggggaagggcgatgtgagggcagcaggggttggtgcacctctggcggatgactttgccccatttgcagacttcatgtgcagctgccgcatcaatgtcagcattcgcgccgtgggatgaatgcaaggcgttaggcactgactcattgacccgggtgccacactggca

SEQ ID NO: 1861 - DNA, 398 bp, Chlorella vulgaris
gaaggcagtgcatctgctgaggaccgaaacggacaaccatgcagattttctgcaaaacagacaggactcatgtccttgagcttagctccgaggccactgtggccgatgtcaaggctgccatcgaggccagccagggcatcccctgcgatgcgcagcgtgtgatgttctctggtcgccagctggaggaggaggcctccctggccgcctgcggcgtgtctgacgacagccagctgtacatcctgatgcgcctgctgggtggtgccaagaagcgcaagaagaagacctacaccaagcccaagaagcagaagcacaagcacaagaagatcaagctcagggtgctcaagttctacaaggtagacgacagcggcaaggtgcagcgcctgcgcaaggtttgcccc

SEQ ID NO: 1862 - DNA, 195 bp, Chlorella vulgaris
tcgacgacgcgtccggcaagcagtccagctgcagcagacacaatcgtgcagtcatgcaaaatttctgtcctgcatccacgccacaagtcggtgaacttggatcacaagctaatgtggcctgtgtcatcgctgaaatcctagttaatgagggtatcctctgagaggtgcatcatcatcagtactctgttcaccaac

SEQ ID NO: 1863 - DNA, 390 bp, Chlorella vulgaris
cccacgcgtccgctgaccctgtctaccacggtaacccatcagcatggattgaaggccaataacaatggtcaggcacaacaacgtggtgcccatccagcacttcaggaagaagtggtatgacaaagtcaggacctggttcaaccagcccgctcgcaagctccggaggaggaatgcccgcgccgagaaggccaagaaggtgttcccccgccccaccgcgggcgcgctgaagcccatcgtgcacggtcagaccgtcaagtataacatgaacaatcgcgctggccgctgcttcacgctggaggagctcaaggaggctggcattccctccaagcttgcccccaccattggcattgcagtggaccaccgccgcacgaataggtcccttgaggggct

SEQ ID NO: 1864 - DNA, 411 bp, Chlorella vulgaris
cccacgcgtccgcccacgcgtccggcaaggagatggcatacatccctctggacagcgagaccaagaccaagggcacggccgcgatcgacgtgatctgcaacccgctgggcaagtccggcggcgccttcagccagcagatcatgatcatcggctttggctcgctggccgcctccaccccctacctgggagccatcctgttcttcatcgtgggcacctggatcctggcagccaacgacctcagcaagctcttcaagcaggcacaggttgacggcgaatccaatcgcaatgcggaggcagctgatgacgccaacggcgccggtggccaggccaccgcctaagcaccccggcagagcgcttgacgacgcaaccgcagccccggccccggaaccttaaggggcccctgctatgccc

SEQ ID NO: 1865 - DNA, 381 bp, Chlorella vulgaris
acggacgcgtgggcgcagacctcctcgcaacttgcagagcagactacggcttgggttatggccaagccctaacaaccgtactggtgttcatggccttgtctggggtttggttgagagctttgtcaggattgaggtttgggacgccaaggttgctggcggtgctgcctattgtgctgggcaactgcgccgcacccaggttgttttgccgcggccttgatgcaacaactatcatgctggccgtcttcaacacagcatggctggccagcttcaaggcggtgtcgtgggcggtacacagaggcccacttgtagacaagcgtctttccctgtcccagttcctggctgtctacatggcccctattactccaaaggatgatgaagttg

SEQ ID NO: 1866 - DNA, 431 bp, Chlorella vulgaris
gtccggctcttagtgaacgtcgcctgcactgtccgatatggcgtctgccctggtcgctacccctcttgtggccaaggcctctgtgaggtctaccggtgttgcaaggcgtcaggctgtggtggtgaaggcccagcagcaggagagcaggagggcagttctgggcctggttgcagcatctgtgctgggtttggcccttgtcccccaagcggaggctaaccaggctgcgccgaagaatggctttgtggccacagcagagggttatgtgatggaaggcaccaagaagcagggtatctcccccaagaggaagcgcgagattctcgacaagctcaaggctgaggccaagaagtaaatgaccagcggctactgagtgccttacagcagtagtgtgactgctgctatgggaaggcctcaaagaaggcacgccgtgccat

SEQ ID NO: 1867 - DNA, 421 bp, Chlorella vulgaris
caggattatcaggatgggtcgccacaaggtgtctaagagttcggcgtacttcagccggttccaggtgaagtacaagcgcaggcgccagggcaagaccgactaccgcgcccgcctgaggctgtgcacccaggataagaacaagtacaacactcccaagtacaggctggtggtgcgcttcaccaacactgacgtggtgtgccaggtggcatacgccacgctctccggtgatgtcgtcgtcagcgcagcctacgcccatgaactgcccaactatgggctgaaggtgggcctgaccaactatgctgccgcctactgcaccggcctgctgctggcccgccgggtgctgaccaagttccgtctggccgagacctacgagggcaacaccggcagccccggcgaggactacaacgtggatgcctccgac

SEQ ID NO: 1868 - DNA, 251 bp, Chlorella vulgaris
cccacgcgtccgaaaaaaaaaaaaaaaaaaaaaaaaaaaaaaaaaaaaaaaaaaaaaaaaaaaaaaaaaaaaaaaaaaaagggaggacgaaaaaaaggttaaaaaaattaggtatgattgaatgataagttaaaaagttttgtatatggttaagtgttttcattttattggttgtggtttttgaaggttcttgtctgggaaacccgtggggttactaattttaagggcttttttgttaatccttctttcgg

SEQ ID NO: 1869 - DNA, 426 bp, Chlorella vulgaris
cttgagcttagctccgaggccactgtggccgatgtcaaggctgccatcgaggccagccagggcatcccctgcgatgcgcagcgtgtgatgttctctggtcgccagctggaggaggaggcctccctggccgcctgcggcgtgtctgacgacagccagctgtacatcctgatgcgcctgctgggtggtgccaagaagcgcaagaagaagacctacaccaagcccaagaagcagaagcacaagcacaagaagatcaagctcagggtgctcaagttctacaaggtagacgacagcggcaaggtgcagcgcctgcgcaaggtttgcccccagtgcggccccggcatcttcatggccacgcacttcaaccgcgtgtactgcggcaagtgccacctcacctacgtctatgacaaggagggagccaaggcataa

SEQ ID NO: 1870 - DNA, 425 bp, Chlorella vulgaris
  unsure (1)..(425): unsure at all n locations
aggctggtgccaagggccatgcgcctgtggcggcatgagcgggtgtaaccgtaagaggctcagccagcctgagaaccttagttgtgagtgcctggattgggtgttcggaactttgcacttggccattccgcttctgctgacatgcttgcatctgctttccttgtggctgtatgcgctgcgtttaccacttctattgtcatagatggaagttgagccgacaaggtggatcgtaaagataaaggaaggtctctgctgctctgggtggtgctcaaccaggggcttgcaggaattcatgctgttggtgtttagcagctgtcgtgctcgtgttttcccctcncgccggcctagcagcattgtggtagaagaactgtgtaggcctctttccctgctgggcaagcagaccgtgagtttcctgagcacttggt

SEQ ID NO: 1871 - DNA, 387 bp, Chlorella vulgaris
agcgcctgcagaacacgctcaagcgccttggggtgaacaccatcccgggcattgaggaggtgctgctgctgaacaacgacggcaccgcgctgcagttcaacaaccccaaggtgcaggcgtccatcacctccagcacctatgttgtctccggccccgcgcagcacaagcgcgcccaggacgtgatggcgcagatgcttgcgggcatgggcggcatgccgggcatggcgtccatgatggcgcaaatgggcgctggcggcgccggcggcttccccgccttcaaccctgcgggcgccgcaaaggagccgcttgatgatgatgatgatgtgcccgagcttgtggagaacttcgaccaggcggcacagtaagcagcaacagcggcggcagcga

SEQ ID NO: 1872 - DNA, 290 bp, Chlorella vulgaris
accacgcgtccgaaaaaaaaaaaaaaaaaaaaaaaaaaaaaaaaaaaggaaaaaaaacaaaaaaatggcaggcgcacctaagggttcaagcttaatttaaactcatataaaaagtaaaaaaactttcaaatcaaaaacagggggtttcgtccaagggggtccattttaaattacccgtaaagggaaaataatggcctttcaaaagtttaacctatttccaattaacggcctttcgtttaaaagcgtaataatggaaaaacccctgacttttcccattttaaaccctttgg

SEQ ID NO: 1873 - DNA, 388 bp, Chlorella vulgaris
gacaaacgaaagccgtacctcgcccctcgggaagagagatggacctgcagaggctggagcagaggctggagcatgctgtggcctgcgaggtgctggcgcggcacaacgtagaggcccagctcaaggagctgcaacgctttgtggtggatgtgagccagcttgcgcctgccgaggccagggctgcacttgccagcaagtcagacgaaatccagaaggagtggcgggtcgagaagaagggcctgcagatgctcgaggagttggagctgcaggccgcagagacgtgggtggaggagcgggggctggggccgtctgaactggagatgctccctagctgcgagcagcggggagaccacctgtttgtggagccagaggttgccgtgtcacccaa

SEQ ID NO: 1874 - DNA, 387 bp, Chlorella vulgaris
gcttcgctgcatatagcgagtgcaagaccgcacatacactaggcgaacgactgctggctagactcatgacgaagtcggagaaaccgggtagcgttgcgcaggctcaccctggtgaccagcctgccagtcccactcagaaggggaccctggccgaggcaggagctgacatgcacaagcaagctgctgccagctcaggcaaggcacctgcctccaagtggtataggccgggggagctgtacacaatggcgcactactaagcttacaaggcattgcttcagccagccgtgcactatgactttgagatgttgtgagaatcgaagagcactggcactggcggcctgctgtgatctttttggaatgttgggcagacgcattctgaggaacact

SEQ ID NO: 1875 - DNA, 383 bp, Chlorella vulgaris
agtttattgtcctaggaggggcccatgaacaccaactttggccaataccccggtggacaggcgcaacccggcgggggaggctttccagggctggggggcagcatgcagggccttcagtcgttgcaaggcggctacattcagaaccaactgcagcagggcaggagtgggttggggggactccccggcaatgcctctcaagccggcacgctggcacatcagcggctagcaggaaggtcactacggggcctgcatcaactacgccaggcacagggccttacagggctgggcacgcagcattatgcaggagttaacagtctcggaacgccgggcactgggctggcatgcgcagtttggctgattcccagcctggcgcatcagcagca

SEQ ID NO: 1876 - DNA, 387 bp, Chlorella vulgaris
cccacgcgtccgaaaaaagcgtcgccatggcttcaaaaaggaagggcggcgttggtggcaacaagttcaggatgtcgctgggtttgccagtggccgcaacaatcaactgcgctgacaactccggcgccaagaacctgtacatcatctccgtggccggctggggcgccaggctgaaccgcctgcccgccgccgcccccggcgacatggtgatggccaccgtgaagaagggcaagcctgacctccgcaagaaggtgcaccctgcggtggtggtgcggcagcgcaagtcctggaggcggaaggacggcaactacatctactttgaggacaatgcaggcgtcattgtgaaccccaagggcgagatgaagggctccgctattaccggccccg

SEQ ID NO: 1877 - DNA, 429 bp, Chlorella vulgaris
ctttgctgagctcaaggtcaaggagatcaagaacggccgcctggctatgttctccatgttcggcttcttcatccaggcacttgtgaccggcaagtctcccctggagaacctggccgaccacctggctgaccccgcctccaacaacggcttctccatcctgaccgccaccaagttcaccccctgaattcagccctgaattttgagggaaatcccctggctgctgctagttcctcgttgttctagctcttggttggttgccggtgtgtcgctgttgtgtgaaggggagaggcgtgaccccttggttgtctactggcagcagcagcagcacccagcagctggacggtcgtattgagatgtgtgtgacgcggcaaaattcgtaacgcacgaggaaccgagaagagcacctttaattccccctgctggttggag

SEQ ID NO: 1878 - DNA, 428 bp, Chlorella vulgaris
accacgcgtccgcccacgcgtccggcgttagcagccgacagccgcacaatatggcggagtcggtgcagaccttcgggcgcaagaagaatgcagtggctgtggcctactgcaagcgtggaaagggggagctgaggctcaatggctcccctctggaccttatccagcctgacaccatgcgctacaaggtgctggagcctgtgctgctcctgggcaagcagcggtttgccaacgtggacatccgcatccgcgtcaagggcggcggccatgtgtctcagatctacgccatccgccaggccatcgccaaggcgctagtggccttctaccagaagtacgtggatgagcagagcaagaacgagatcaaggacatcctgctgcagtacgacaggacactgctggtcgccgatcctcgccgctctgagcccaagaag

SEQ ID NO: 1879 - DNA, 341 bp, Chlorella vulgaris
ggtgacccgcgagtataccattaacctgcacaagaggctgcatggcataaccttcaagaagagggctcctaaggccatcaaggagattaagaagtttgcccagcaacaaatgaagaccagcgacgtgcgcgtggacgtcaagctgaacaaggccgtgtggagccagggcatcaagaacgtgcccaaccgcctgcgcattgtgatccagcgcaagcgcaacgaggacgacgacgagaaggaggagatgttctccctggtcaccctggccgaggaccagagcagcaagggcaagggcgtggtggtcctggaggcataaacacacacacgcgcctcgcgggggg

SEQ ID NO: 1880 - DNA, 419 bp, Chlorella vulgaris
cccacgcgtccgccggcgactacggctgggacactgctggtctgtctgccgatccccaaaccttcgctgcctaccgcgaggttgaggtcatccatgcccgctgggccatgcttggcgccctgggctgcctgacccccgagctgctgcagaacgccggcgtggccagcttcggcgacgctgctgtgtggttcaaggctggtgcctccatcttcggcgatgatggcctgaactacctgggcaacccctccctggtccatgcccagtccatcgtggccaccctggccgtgcaggtcatcctcatggctcaggctgaggctttccgtgtgagcggcactgccccctggagcggcgaggagctcgacaccctgtaccccggtgatgcctttgacccccttggcctggctgacgaccccgacacc

SEQ ID NO: 1881 - DNA, 398 bp, Chlorella vulgaris
ggtggctccagttcttgctgaggaggctacagtggtagtagcagtagcagtagcggaagagcctgcaaagaagaagaagaagccgaagaaggacacagcaactgaggaagcgccagcagccattctagcaccagaggagaagtcaaagaagaaggagaaagcagcagcaggcggtgcagcagtagaggtagcgccccctggggcagcagcggaggggcccaaattgcagaagaagaagttcaagaagggcaaggctggtgtaaccgaaggtgtagcttctgcagctgaggcaccggcccctgcggcagcagctgaagaacccaagctgaagaagaagtccaagaaggagaaggcagcactggcagtggaagccccagcagctgaagagccagcagcag

SEQ ID NO: 1882 - DNA, 361 bp, Chlorella vulgaris
atctgcttcagccagcctttgcaaaggttcctcgaagtctccacaatggccgccgctatgtgccagacctctgttgcccgggccttcgcccctaaggtggctgcccagaagcgccagcgcgctgttgccgcccaggcctatgttggcaactggctccccggcagcgaccgccccgcctacctggagaagctccctggtgcctacggctttgaccccctgggcctgggcactgagcccaagagcctggagcgctttgtggaggctgaggtgattaacggccgctgggccatgctgggccttgccggcatgctcggcgtggaggccctgggctacggcgactggtacagcgcatccctctggg

SEQ ID NO: 1883 - DNA, 408 bp, Chlorella vulgaris
cggacgcgtgggcggacgcgtgggctggcgtcggagcggctggcaacatggcgaccgagattaagttgttcggcaagtggagcttcgatgaggtggaggtgaacgacatctcccttgaggactacattgccgtgaagcccaagtatgcgcgcttcaccccccactctgccggccgtttccagaagcgccgcttcaggaaggcgcagtgccccattgtcgagaggctgaccaactctctgatgatgcacgggcgcaacaacggcaagaagctgatggcggtacgcatcgtcaagcacacctttgacatcatcaacctgctcaccgaccagaaccccatccaggtcctggtggacgccatcatcaacggtggtccgcgtgaggatgccacccgcattggctccgccggtg

SEQ ID NO: 1884 - DNA, 422 bp, Chlorella vulgaris
gcgccgggcgacgggaggcaagcagaaggcttggcgtaagaagaggaagtatgagctcggccgccagcccgccatgaccaagctgtcctccaacgtgacagtgaggcgtgtgcgcgtgcgcggaggcaactctaagttcagggcgctgcgcctcgactcgggcaacttctcctggggctccgaggccgtgacccgcaagacccgtatcctggatgtgtcttacaacgcctccaacaacgagctggtgcgcacccagaccctggtcaagaacgccatcatccaggtggacgcaacccccttcaagcagtggtaccaggtgcactacggccaagaggtcggcatcaagaagaaggccgccgcaaccgccgcagccgccgcacccgccaagggcaaggcgcccgccgccacccagagaagccatg

SEQ ID NO: 1885 - DNA, 360 bp, Chlorella vulgaris
cactgcaaaaggccgccctggagcagtacctggcaggcggcctgaacatggaggcgatcaccacccaggtgaccgatggcaagggggccatgcctgcgtggggtgaccggctgagcgaggaggagattgaggcggtggccaactatgtctttgaccaggcctccaacaataagtggtaggggggtgaagccttaccaggctgagataaggatggccggtatcccagaggcacttacacatttttggtacagtgttgaggatgcgagggcttacatcatgtgatgtatgatgtttacatttaccctggttgttcggctaagtacaggtatactactgtcagagaagtaaaagtcgagcctt

SEQ ID NO: 1886 - DNA, 402 bp, Chlorella vulgaris
cccacgcgtccgcggacgcgtgggcgaactaacgcctatccgaggcttcctcgaagacagaagacatcaacatgtctgacggaggggacagcccgaaggccgccgaggcccccgccgccgccgcggctcccgcccccggcgagcccatggacatcaacaccgccatccagctggtgctcaagaaggcgctggctcacgacggcctcgcacgcggcctgcacgaggcctgcagggccattgagcgcggccaggcgcagctgtgcatcctcgccgacgactgcaaccagcccgactacaagaagctgattgaggccctgtgcgccgagcatagcgtcaacctcattgccgtgcccgaccccaagaccctgggccagtgggcaggcctgtgcaacattgacagcg

SEQ ID NO: 1887 - DNA, 381 bp, Chlorella vulgaris
  unsure (1)..(381): unsure at all n locations
agtgttcccccgccccaccgcgggcgcgctgaggcccatcgtgcacggccagaccgtcaagtataacatgaagaagcgcgcgggccgcggcttcacgctggaggagctcaaggaggctggcattccctccaagcttgcccccaccattggcattgcagtggaccaccgccgcaagaacaggtcccttgaggggcttcaggagaatgtgaaccgcctgaaggcctacaaggccaacctggtggtgttcccgcgccgcgccggcaagcccaaggccggcgatgccagcgcggaggagctcaaggcggtcgcgcagctcagcggcccggtgctgcncgtcacacgcgctgcgcccgctctggagaaggttgccatcaccgccga

SEQ ID NO: 1888 - DNA, 260 bp, Chlorella vulgaris
tccgacagaacccttcatgttaccctctggaactgcatttaaatgttgcctcttcttggccgctaaccatcgctcataggtggagctgacgatggtcatgattcgctctgcgctgcaggatctgcgcaccccaactgttgtggttgaaggtgttacgacacggtacctggatcctgctaaggacctcttttaggatatggccatagactcacgttgtttgcagcacctgctcacagtgaactggcgacccagcgcccggc

SEQ ID NO: 1889 - DNA, 420 bp, Chlorella vulgaris
  unsure (1)..(420): unsure at all n locations
atggattgaagccatcgttccctgtgccatcatcactgtcatggtcgccggcatgggcgggctgcaaggggctgtgcataaggccttctatggcaggccaaaggcgcacggtgtggacgagtgggacaggctgatcgagggcagggatgagcgccttgcaaaggagtatcagacagctcagcagtaccagagcgcccagtaaactggggccggccttggtgtggaacctgtgcgtggtgacacttttcgagctgctgtttgttgtgtgatgtgttgttcagtgttctccgttaggaggtgcctgcggttgttgtgctgcatcagctacgccagccttgattttataggaagtgggcttgtgtttactggcacaggcaaggtanctgtgtattttttcagtaccgaaagctggtagtgttt

SEQ ID NO: 1890 - DNA, 423 bp, Chlorella vulgaris
aaagaacccttcatgttaccctctggaactgcatttaaatgttgcctcttcttggtcgctaaccatcgctcatagctggagctgagatggacatgatccgctctgctctgcagcatctgcacaccccagctgttgtggctgaaggtgttacgacacggtatctggacctgctaaggagctcttttaagatatgcgagacactcaggttgtcttcagcaagtgcccacagtgaaatgcccgacccaggccctgcttctgctgggcctcgggttgccatcatgtctgagccgggtgctgggtatgtagccagcacttggggcacttggctgcacaaggggatcgctgtacccttgtgcctgtcgcacccagacaggtccttgcaatatgtgctggaagatgctggagtgacatccatgctagcct

SEQ ID NO: 1891 - DNA, 373 bp, Chlorella vulgaris
aagtccatcgtggccaccctggccgtgcaggtcatcctcatggctcaggctgaggctttccgtgtgagcggcactgccccctggagcggcgaggagctcgacaccctgtaccccggtgatgcctttgacccccttggcctggctgacgaccccgacacctttgctgagctcaaggtcaaggagatcaagaacggccgcctggctatgttctccatgttcggcttcttcatccaggcacttgtgaccggcaagtctcccctggagaacctggccgaccacctggctgaccccgcctccaacaacggcttctccatcctgaccgccaccaagttcaccccctgaattcagccctgaattttgagggaaatcccct

SEQ ID NO: 1892 - DNA, 424 bp, Chlorella vulgaris
gtccaatgagagtacattgtagttgcagctgtttggccggtcaactgagaaggcgtcgatcttgttgggctggcctcctggcttgtgttggagcctcctgttgccgctcctctataccctgggttctgagctgttaggcgggcctcaccagcgagttgggcgcccgcccattccttgtagcccggcatgagctgcacagagcttatcacacggagcgacgccatccttaaaaaatatgagagatggattggcgacccgcagcagcagcgagagaagacggacgacccgttcatggacgagtatatgaacgtgatggacagggtgcaggatctcaacctgaaagctgaggagattgctcacgagaaaaatcgggcgctcaaggctgccatgaatgcggagctgcgcaagtcaaaggccttcttgc

SEQ ID NO: 1893 - DNA, 217 bp, Chlorella vulgaris
cacccgccaggtgacccgcgcctctgtggagtggtacggccctgaccgcgccaagttcctgggtcccttcaccaaccccccctcttacctgaagggtgagttcgctggcgactacggctgggacacctctggcctgtccgctgatcccgagaccttctcccgctacagggaggttgaggtgatccatgcccggtgggccattcttggcgccctgggc

SEQ ID NO: 1894 - DNA, 417 bp, Chlorella vulgaris
acccaggcgtccgaccacgcgtccgaccaactcttgctcgtaactttggtcctggggcacatacatgtacttctagccattgcctgccttcttgctcaaatcgacacttgtacttccctgctacagacttgctcggttggccgtgcgccatgtacttccaactccgttgatgctttccctcttgaccatgggtcacttgtttcgtcaagagtggcgccctgtgcgggccgctacatccattgcttgacaaatgtgtggctggcatcccattgcctgaccaaccgccgttcattagtgctacatgccctccatgcgggggcggacgttgttttaccaaagggcagtttggtgaattaaatatttttagggatgagcttaaaaataaaattttattaaaatttaatttttacataaaaa

SEQ ID NO: 1895 - DNA, 429 bp, Chlorella vulgaris
cgcgtccaacacgagtccgcaggggtggttggtggagaccctgcccatcagcagccatgggtatctcccgcgactcgcttcataagcgccgggcgacgggaggcaagcagaaggcttggcgtaagaagaggaagtatgagctcggccgccagcccgccatgaccaagctgtcctccaacgtgacagtgaggcgtgtgcgcgtgcgcggaggcaactctaagttcagggcgctgcgcctcgactcgggcaacttctcctgtggctccgaggccgtgacccgcaagacccgtatcctggatgtgtcatacaacgcctccaacaacgaactggtgcgcacccagaccctggtcaagaacgccatcatccaggtggacgcaacccccttcaagcagtggtaccaggtgcactacggccaggaggtcggcatca

SEQ ID NO: 1896 - DNA, 392 bp, Chlorella vulgaris
  unsure (1)..(392): unsure at all n locations
acgcatccgctctcgactgagtactggagctccaacaagggggcattttcccggaaccggtcgtttttggtttaacaatgcaaaccccggtaccccccttccttcggggaaaggtacccctggtcacaggttcgtcaactggcattgggatggggatcttgaggagcttgtcagcagcgggggcaaccacggtgatgcaccgacttgttgcacagcaagagcttanggacaagtgtgctactgtagagaaggagtatggcaataagctgggctattcggcagcagacctgacgaagccacaggaaattaggctggctgtgtctgcagggatatggtgaagaaggttcacgacgattttggaggccttgacatcctagtcaacaatgctggta

SEQ ID NO: 1897 - DNA, 407 bp, Chlorella vulgaris
cgtccgacacgagtccgcggcgcttgggctcgatggtggcatccagaaccagtagcacttgggaggcggattgccatctttgacattgagcagccaacctggcagcatatggtgcgggagggaggccttggtcggggtccatggttggccctcgaatggccaatccggtggttggcccttcaacggtcaacgcagccttgggtgcaccgtgcccaacattctgtgatgcggcctctactctgaccgtaggttgcggcatgtggcgaggacgtggggtgaaaccttgaggcgtcactgcgggtgtcacggtatgctagggggctttcctgagcatttgataacaagaggaacggcgtggaaccgtcattagtatagtgagcctcaacgagtttttctggctggcgtac

SEQ ID NO: 1898 - DNA, 376 bp, Chlorella vulgaris
cgcgtccgcgcctggctgactcctgcggcatcgacctaggacaagcagcgctatccaagctgcaaaagaaccgagagaagtatcccgtggacaagtgccgcggatcatcggctaagtacacccagctcaggcaggaagcagccagagggagcgatacagcggtgagaggggccgagcagcaggattagctttcccagtgtacccattattacatcctccgcatgcttgtacactagctacagatggcagttggtgcgcagagaggatatatagcacgggtgcatgcactgcaggcctggcgtgcttatttggttagtgtacttgacggtgctgacaccttggtgggtaggcgcacctgctagggcttgatatgatt

SEQ ID NO: 1899 - DNA, 444 bp, Chlorella vulgaris
cccacgaatccgatacagcgagcctctctcccccctcaggtcctcactgcaagtaagaggcaatgtcaggcgttggcaacctgggcggcggccctattcctgctttgcagaaggcccaccaagccgcggctggctttacttaccagaagagcggcgtgctaaccagacgcgtaatccctcttgctttcactgctgccgcttcgtttgctctggtgacgggccttttcggcatgtacacgggcaaggggaagatggattgagagctctctgtactgcccagcacctaggagctgccaagctggtggtcaggactgtgcgctgccgttaaggacatgagcgctgggatgctttggcactgatattgtgtaaagaccctgtgtgtaccaaagcgccgtataacttgacatctcctttttgctcctcttgtttgatgtgctaaatgtt

SEQ ID NO: 1900 - DNA, 370 bp, Chlorella vulgaris
ttgttctgcagcatgaaagctctcctgcaccctcaggctacaggaccggtgcagctggcgaggccggcttgtgcacctcgcattcataggagacttcgaatctatgcacagaccgctaagcaggaggaggtggtggatggcaacgtgaatgcttactgcagcatcgacgctgagggcaagaggcccattaaggagctgacactaggagagaaagagcagctattcctcgaggcactttcggcattctattatggtgacaagcctgcagtcagcaatgaggagtttgacaaccttaaggaggagctgcaatgggagggcagcaaggttgtcctcctcaggtaagcttgtggtgtctggcaggttacgtcag

SEQ ID NO: 1901 - DNA, 404 bp, Chlorella vulgaris
gtccgagaattacgaggctgctgggagccaagccagtccgacctgaacttgggagcagaagcctgagtgggaccatacagcaaccctccagaacccgtgcttgatcagagcctaggcacttgaggagtgggattgagggcaaccatgtcctcctcagcagctgcttccgcatactggagggtggcaggcatgagctacctcaagtattctaacctttgcgcggatatggtgcgtgccgcacttaaggatacagcaaagaccaaggccaaggctcgggaggttatctactaccggtcagcagtctggaagaacggcgcccctgagaagcaagtcatcactgacattaccgaaggaacagcagggaagttatcatgaggcaccttggggcactgcaagcgcagcta

SEQ ID NO: 1902 - DNA, 373 bp, Chlorella vulgaris
aaggacgcgtgggcggacgcgtgggtgaccataggttcgcatgacctgacttctgacctgtatggctttccgacgaaggctaggtagaatgtaacagttttgacgcctttacattaggcagcatgttgcagtggcgtccttcctacagggtttgacgagggagttttgcaaatgaacccaaaagtcagcgggtcagcaacaacctgtgcagtgtactccatatttcgtgttttgaacttgaccagttgtatgatatcgctgttggcgactgttgtaaaggtgcctgggaaggcatgtctgctttcattgtgtgtcatgtgtctggtgaattgtgtgtcatgtgttcgttgaatacctgtgactagttcactca

SEQ ID NO: 1903 - DNA, 365 bp, Chlorella vulgaris
acccaggcgtccaaaagatggagcggggcccaaagaaacatctgaagagattgaatgccccgaagcactggatgctcgacaagcttgggggcatctttgcccccaagccgagcgcgggcccccacaagacccgggagtgcttgccgctcatcctgctgctgaggaacaggctcaagtacgctctgacgggcaaggaggtgacgagcatcctcatgcagcgcctggtagaggttgaccgcaaggtgcgcactgacaagacctaccccgtgggcttcatggacgtggtcaccatccccaagaccgacgagcacttccgcctggtctacgactgcaaagggcccctttgtggtgcaccgcatcagcaa

SEQ ID NO: 1904 - DNA, 380 bp, Chlorella vulgaris
ggtggaaagggcttgtcttccgcaagccaaaatgccgtccataggcttttaccgcaactatggcaagaccttcaagaagccccggcgccccttcgagaaggagcggctggatgccgagctgaagaccgtgggcgagtacggcctgcgcaacaagcgcaagctctggcgtgtgcagatggtgctgtccaagctgcgctccagggcccggtccctgctgaccctggacgagaaggaccccaagcgcctttttgagggtgaggccctcatgcgccgcatgtaccgctacggcttcctggacgagacccagaacaagctcgattacgtgctggcgctcaaccctaccgacgtgctggagcgccgcctgcagaccctggtgttca

SEQ ID NO: 1905 - DNA, 441 bp, Chlorella vulgaris
gtccgaacacgagtccgcccacgcgtccggaggaaggcagtgcatctgctgaggaccgaaacggacaaccatgcagattttctgcaaaacagacaggactcatgtccttgagcttagctccgaggccactgtggccgatgtcaaggctgccatcgaggccagccagggcatcccctgcgatgcgcagcgtgtgatgttctctggtcgccagctggaggaggaggcctccctggccgcctgcggcgtgtctgacgacagccagctgtacatcctgatgcgcctgctgggtggtgccaagaagcgcaagaagaagacctacaccaagcccaagaagcagaagcacaagcacaagaagatcaagctcagggtgctcaagttctacaaggtagacgacagcggcaaggtgcagcgcctgcgcaaggtttgcccccagtgccgccc

SEQ ID NO: 1906 - DNA, 350 bp, Chlorella vulgaris
gcgtccgatggaatcccccgtcgacaacaggtccaaggttcacaagatgcaaaccctctctgcccgtttcggggtccgcgcccctgtctcccgggggaaccgccaagtgaaccgcgcctccgtggaattgtacgggcccgaacgccccaagttcctggggccctttaacaaacccccttcctaactgaaaggttaatttcctggggactacggctgggaaaactctgggcctgtcggccgatccgagaacttttcccgctacagggaggttgacgtgatccatgcccggtgggccatgcttggcgcccttggctgcgtcgtgcccgagctgctggaccgcaacggcaccg

SEQ ID NO: 1907 - DNA, 444 bp, Chlorella vulgaris
gcgtccgaaacccatccctcatccacgcacagtccatcgtggccgtgccgctcccccaaaattttcctaatgggcctgtttaagggcaaccccttaaacggcggcccccctggcgagggccttgacgccctgtaccccggcgaggcctttgaccccctgggcctggccgacgaccccgacagcttcgcggagctcaaggttaaggagatcaagaacggccgcctggccatggtgtccatgcttggctttggcgtgcaaggcctgctcaccggcaagggccccctggagaacctggctgaccacctggctgaccccaccgtgaacaacggctttgccgtggccaccaagttcacccccggcaactgagctctagaacctggctccgcagcagtgatttgaggcatgcccaaacccatgaaccgctccacaaacttgtgtaccctg

SEQ ID NO: 1908 - DNA, 257 bp, Chlorella vulgaris
ggagcggggacctgctggagaaggactccaacatcactgtgtctccccgataagcgggcggcacacctggccgagcgacggtggctgcagcagccaactgcaacacaggcagtcggtgatgccagctgctatggtgggcatgggcggggcatgagcgcattccatcagcatgtgtagcagctgggggtagcagcttgctgttgctgtgtatctatctactagggtgcgtgctgtcctgttaggatgatgccaggggg

SEQ ID NO: 1909 - DNA, 339 bp, Chlorella vulgaris
cgtccgagtagcaggagtgtcataagaccaaaggcggccaagccgggtgtaagaccatggcagcgcttggcctgaagcctgcagtggggttgcagccctccttccgaggcgtgacgaacgcttttaagagcctgaacatcagccaacatgcgcccatgccgcagagactcacggtgcaagccacgcgcgagtgccagctgaccggcaagcgcgccaacaatggctatgtggtcaccttctcacacaagcgcaacaagaagctgcagcacatcaacctgcagtacaagaaggtgtactggccggaggggcaacgctgggtgaagctgccgatctgcacca

SEQ ID NO: 1910 - DNA, 437 bp, Chlorella vulgaris
cccgcccgtccgaccacgcaaccgagcgattcgaactaacgcctatccgaggcttcctcgaagacagaagacatcagcatgtctgacggaggggacagcccgaaggccgccgaggcccccgccgccgccgcggctcccgcccccggcgagcccatggacatcaacaccgccatccagctggtgctcaagaaggcgctggctcacaacggcctcgcacgcggcctgcacgaggcctgcagggccattgagcgccgccaagcgcaactgtgcatcctcgccgacgactgcaaccagcccgactacaagaagctgattgaagccctgtgcgccgagcagagcgtcaacctcattgccgtgccctaccccaagaccctgggccagtgggcaggcctgtgcaagattgacagccagggcgatgcgcgcaaggtggtcggctg

SEQ ID NO: 1911 - DNA, 417 bp, Chlorella vulgaris
cacgcgaccgcccacgcgtccgcctccatctgcctgggctccaactacaaccagacggtcaagggttttgccgaggcgggaggacaaccaagcccctccctcatcctggcctactctccctgcgccatgcatggcatggacatgaccacctccaacagcgatgccaagatcccggtggactcgggctactggccgctctaccgctaccagcccggcaccggcgagggtgatggcaagctgatcctggattcaagaagataagggggagctggaggacttcctcagcatggagaacaggttcaaggtgctcaagcgctccaaccccgaagaggccgagaagctgaagaacaagctggaccgagacatcaagctgcgccacgagcgcctggtggagtgggccaagcccaaggccaaccc

SEQ ID NO: 1912 - DNA, 395 bp, Chlorella vulgaris
cccaggcgtccgaccacgcgaccgcccacgcgtccgctcgcagcgcgcctcttgcacgccgccgcccgaaccggctctgcggctgcacctcgtgctgtccacctgtcctgctctgttgcccggccgctccctgtactgcaacacatgggccaggcagcgtcccttttcacaggcagcaagaaggttagagcggcggtgccagcagcagccaagaagtctgcaggctttgacaaaccacaggaagaggaccccgacttgtggctggtggtggggctgggcaaccctggtccacgctatgagcacacccggcataatgttggcttcatggtgatagatgccttggcccgtatggagtccatcacagtggaccgcctccaggagaatgccgctgttgg

SEQ ID NO: 1913 - DNA, 116 bp, Chlorella vulgaris
gcgtccgaccacgagtcctctgacgcgtgggcgggcgcgtgggtcaggattggtaacagtgcaaggcttggctgcatgcatgatgtgaggtttgaggcctacttcccatgcctgaa

SEQ ID NO: 1914 - DNA, 404 bp, Chlorella vulgaris
cgtccgagctgaaacccacctggggatgcgctggggaagagcacttttaggggcgccaccgaagttgttaatggcaagatgggtggcaacggcgaaagaaattccccttcaaccaaggtttaaacgttgcgccggtttcccaaccctcgtcttcgtgaccaaggcgggaaacgtgatccccttcaacggcgaccgctccaaggacgcgctcataaagtttgtccaggagcagcgcgtccgggcgcgcaagaatgaacgagcgaacgatgtatgaaagggggaaggccgaaagagcccaaggccgcatctgatgaagcagatgatgcagaggaagacaagaaggacgagctttgaggcattgctgtcaaaattgagatactaactgccagctcaaagcagctttt

SEQ ID NO: 1915 - DNA, 365 bp, Chlorella vulgaris
gcgtccgatctaaggtcagccggggcaggcagaacggtgtttcaatgggtgtaagtacggttttcggcggtgcccccttgacttgcggggtatgtcacccgctgcgtgcatgttggtgtgtcaacgggcatattctgtctgtgtgcactgtgcgactgttgcgtgtacacgctgtcgcggtcttctgcctggactttgtgagataacagtgctgaaacatcactgcggcagtggctccttgtcgccgttggagtgtttgaatttgtccttctgagagggcacggttatgaagcatgcttcgtaatcatctgactacttcattggaggtgtaactttctatgacaaataacataccaactcccacc

SEQ ID NO: 1916 - DNA, 379 bp, Chlorella vulgaris
ggggaagcccgcaaaacgggccttcagcccggaccaagcattatgccgacgtttccgctgtgaagtccgtcgtccgtgcccgacggacagaagccctttctgagagctgatggcggtggctatgtgcccacccatccctcctgtggtactgctatggtggcaggtctgcagagcgcatactcgctagcgctgaaggcatcatgaacccagcgcaacccctgttctacatgaaggccatatctggaattacctcttcactccaggccaagcaggagcccaggtttttagcaatcccctagcagccgatgtcctagcgccccaccgccgacgggcggtctatagcattgagagaggcgcccctgtggacctggccgacatc

SEQ ID NO: 1917 - DNA, 289 bp, Chlorella vulgaris
gacccaggcgtccgaggacgcgacggcggatacgtgaggttttatttttactccccagtacttctaattctcaccaatgttgcagcagcttactggttcagggtacttggctattcctatgatccattctattaatatggtgctgttgtcatttcgctgtcatgttacgtttaatagcaggtttcgcccccttctctttcacctggctattccgtctgcctccttttcttccacatcaccgctctcacctgccgacagctgaatttatttcggcacggtagtttctccg

SEQ ID NO: 1918 - DNA, 391 bp, Chlorella vulgaris
cccgcccctccagttctgcaattgccttcaagagcagggcagcccagaggcccatccgcagccccttcaaggtccatgcctacaatgtcaccttccgtgacgccgccaagggcaccgagaaaaccgtggagtgcggcgctgaggactacctgcttgacattgctgacgccaacaggattgacctgccagccagctgcaggggtggcatgtgcggcaactgcgtgagcaagctggtgtcgggccagatctacaacagctggcagtgcgaactggactacggcaacgtgctttctgccgagcagatggcagccgggtggatcctgccctgctcaaccaagccccagtctgacctggtgatcgagtacagccagaggtggggcatccaggtcat

SEQ ID NO: 1919 - DNA, 359 bp, Chlorella vulgaris
tcatcaaaagagatgatgagcgcaacctgccggagctcctggccaagctgaataaacaggcagacgggagtgacgccccctccccggctgcctccaaggaaactgaagtcaatgcgctgcagcccatcagcgagaattacaagatcacgaatgatgacgtggagaagatcctgaaatggagggacagctctgactactaagcacagcggtcaggggatgaccttgcctggggctggctggctgcttgcctgcgttgcttccgccgggtctccctgaggcctccccatgctgggacactggggcatcagcaccacctaatgttgcggcatcaaaggagctgctaaacttgcctgagcctc

SEQ ID NO: 1920 - DNA, 396 bp, Chlorella vulgaris
gtccggggcttcaacatggtgaagtacgctaaggaggtggacaacgccaccaaggccgccaaggcccgggggtctgacctccgcgtgcacttcaagaacacgcgcgagtccgccgcagccatccgcggcaagagcctggtgaacgccaaggcgtacctggaggctgtcattgatcacaagcgctgcatcccgttcctgcgctacaatggtggcgtgggccgcaccagccaggctaagaatgagggcaacaagatcggccagggccggtggcccaagaagagctgcgagttcctgctgggcctgctcaaaaatgccgagagcaatgcagaggtgaagggcctggacacggacgccctgtacgtgtctcacatccaggtcaacaaggcgcaaaaaggg

SEQ ID NO: 1921 - DNA, 385 bp, Chlorella vulgaris
gcgtccgaccacgaatccgcccacgcgtccgcaagatggtgcagcgtctcacttataggggggttcaaaactatgcaacaatttcaacaaacaatccctgggtgaaaacgccatatggaaagcttgtgtatagatgctcaagaacccgggctcaatcccgacttgcccgatcagcggtcataagctgaagggcctgcccgctcccggccccgacagcctctctcgcattagcaattcaaagaataccgtccatcgtgcttatggcgtgcacctcagccatgctgtcgttaaggaacgcatcatcagggctttcctggtggaggagcagaagatagtgaacaacgtgctcaagctgcataaggccaatgagaaggcagctgaaaag

SEQ ID NO: 1922 - DNA, 362 bp, Chlorella vulgaris
gcgtccgaccacacgtccgcccacgcgtccggcacttcccgcaaacgacaattatgtgcggcatgacaagggcccaatggtcatacggccgccggcgccgccgccccccacatggagcgagcctgtcattacgcccatacccgaggaggaccgcggcaagaagacgctggtgctggacctggacgaaacgctggtccactcctccttcaagcccatcccgcagcccgattacgtcatcccggtggacattcagggccggatagtggacgtgtatgtgcacaaccggccgttcgtggaccacttcctgcgcacactgggccaccgacttctaggttgtggtattcagtgcaaacctgcggaag

SEQ ID NO: 1923 - DNA, 280 bp, Chlorella vulgaris
agaatacggtcatattccagttttgcattgacagcacatatgatacatactacgtgaccccacctttgatattgtgcagcttgccctgcagtcttgttaggttagcgagttgttcggcgtgcatgtgctttgactatcaggcagtggtttcatacagcgtggctccacctcaaaagcccgtatggcacagcatagtttgtaaaggcagcacccttgaaaaaaaaaaataaaaacaaaaaaataacaaaaaaggagacacaacaacaatacggtcacgaac

SEQ ID NO: 1924 - DNA, 316 bp, Chlorella vulgaris
acccacgaatccgattatcctcgagtatggcaataaaaatcttacattttctcactgaggggccctgcatgggtatggtgcgtgagtctcaggcaaatggtataccacctgggccgcctttgataatgtgatatcggtcaaaagcaaaaaaaagaaaaaaaaaaaaaaaaaaataaaacaaaaaaaaaaaaaaaaaaaaaaaaaaaataaataaaaaaaagaaacaaaaataaaaaaaaaccaaaaaacatcgaacaagcgactcaagaatcaaacaaaaaaaaaaaaaaactttataaaactctaaaccacccta

SEQ ID NO: 1925 - DNA, 357 bp, Chlorella vulgaris
ctccaaagacactaccgttagcatctattttacctgtgtacgcgcttttttagggcccttcagcatccattggatcttgtgatgcttacttactattctgaccgaagatgtaagggttatcagtgctgaattgacttgttgaatcgtgtgtaccaaggatcacatggccaccagcctgcagttagaacattccgaattcagccgcccggacagcttcccattttgacagtgggatgtatgttctgcatgtcctgcttatgctgcctgctcatgcctatctgtctatgtccacatctttgatagcatgccatgtggtcctcatgcccgcaagttttataattatgaaatatcacatca

SEQ ID NO: 1926 - DNA, 410 bp, Chlorella vulgaris
cgtccgagtcggagcggctggcaacatggcgaccgagattaagttgttcggcaagtggagcttcgatgaggtggaggtgaacgacatctcccttgaggactacattgccgtgaagcccaagtatgcgcgcttcaccccccactctgccggccgtttccagaagcgccgcttcaggaaggcgcagtgccccattgtcgagaggctgaccaactctctgatgatgcacgggcgcaacaacggcaagaagctgatggcggtacgcatcgtcaagcacacctttgacatcatcaacctgctcaccgaccagaaccccatccaggtcctggtggacgccatcatcaacggtggtccgcgtgaggatgccacccgcattggctccgcccgtgtggtgcgccgccaggctgttgatg

SEQ ID NO: 1927 - DNA, 387 bp, Chlorella vulgaris
gacccgcccgtccgaccacgcgaccgcccacgcgtccgcccacgcgtccgcgtcgacaacaggtccaaggttcacaagatgcagaccctctctgcgcgtttcggcgtccgcgcccctgtctcccggggcacccgccaggtgacccgcgcctccgtggagtggtacggccccgaccgcgccaagttcctgggccccttcaccaaccccccttcctacctgaagggtgagttcgctggcgactacggctgggacacctctggcctgtccgccgatcccgagaccttctcccgctacatggaggttgaggtgatccatgcccggtggggcatgcttggcgcccttggctgcgtcgtgcccgatctgctggaccgcaactgcaccgtcaac

SEQ ID NO: 1928 - DNA, 428 bp, Chlorella vulgaris
accacgcgtccgcccacgcgtccgcccacgcgtccggcaggatggggtttgaatgggctaaccgcagctactggcatctgtggctatgtagtgcatcagggccttgtttgtgctttgtgaaagcagctcagctcacgtagtgtcagcagcttgacagaagcctgttgtgttgtggagtccctttgtgcacattgcttttgggatgtagtggcgccttgtcttgcggcctcgcatgtattatcttgctcttgggggcctgggggtgattattcttccactgccagttgcagtgcacctggcagcgactctttgacagcaaagttttccaacacatagcgcaggttgtgcattacatcaaacagtgactccttggcgctttgatcattattgcaacatttgtgagactctgttttgcttttcatctctgc

SEQ ID NO: 1929 - DNA, 386 bp, Chlorella vulgaris
gacccgcccgtccaggagctcaacaccctgtaccccggtgatgcctttgacccccttggcctggctgacgaccccgacacctttgctgagctcaaggtcaaggagatcaagaacggccgcctggctatgttctccatgttcggcttcttcatccaggcacttgtgaccggcaagtctcccctggagaacctggccgaccacctggctgaccccgcctccaacaacggcttctccatcctgaccgccaccaagttcaccccctgaattcagccctgaattttgagggaaatcccctggctgctgctagttcctcgttgttctagctcttggttggttgccggtgtgtcgctgttgtgtgaaggggagaggcgtgaccccttggttgt

SEQ ID NO: 1930 - DNA, 428 bp, Chlorella vulgaris
cgtccgagacaaagccggcaagaccacgctgatgcacatgctcaaggaacaaaagccttcacaacatcagccaacgcaatttccaaactcaaaagaatttcaaatggggggcaaaaacttcaaaggccttgaacttggtggtcaagacatccccaagaaaatttggaaaggacaatatgccaaaggttgatgccattgtattcccaatagattcaacggaccgggaagcggtttcatgagtccaagaaagagcttgattcgctgctcagcgacgactccttggccacagtgcctttcctgatcctggggaacaagattgatatccctaccgcggcatccgaggaggagttgcgctatgcgctggggctgacaaacatgacaaccggcaagggcaacgtggacctgaaggactccaacatccgccccat

SEQ ID NO: 1931 - DNA, 414 bp, Chlorella vulgaris
aggacgcgtgggcggacgcgtgggcggacgcgtggggttttacacaggtgggcagcccgtgccgcttacgctctgctggccggaccaaccttccgccagacccactgggagcggcaccatgcccatgtttccttcctggattgaagccatcgttccctgtgccatcatcactgtcatggtcgccggcatgggcgggctgcaaggggctgtgcataaggccttctatggcaggccaaaggcgcacggtgtggacgagtgggacaggctgatcgagggcagggatgagcgccttgcaaaggagtatcagacagctcagcagtaccagagcgcccagtaaactggggccggccttggtgtggaacctgtgcgtggtgacacttttcgagctgctgtttgttgtgtgatgtgttgttc

SEQ ID NO: 1932 - DNA, 409 bp, Chlorella vulgaris
ataatttgaattaatgatgggaagttgagtctgcttagatgccctgccttttggatgcaataaagtgtatgtattgtttacctgtgctaccacgatttgtgcgataccgtctggctcagctcaggcggtgcactctttttcccctgggcaccgcaatctcaggtgttgctctcttccacattcctgacatatttgggtgtgcgacatgcgtgctggttgttagtaaccatcatattgtggcctgtactcccacccattgtgccttggactacaaagtacgactttggtgaaaggggctcctgccctgccacagggcagcctgctttctgtccgggattgccgctgttccggtatgacccccctatgcacacttttcctcctacacacttcttgcgcccacgcttattgg

SEQ ID NO: 1933 - DNA, 441 bp, Chlorella vulgaris
acgcgtccgaccacgagtccggcacacttcaaaacatgaagctgcttgggttgacaacaagcgtcctgccatgccggccccgggccctccttgtggctcgcgcccacgtcgcccgcaagaggttggtcgtctctgcccaagcagcgaataccaagccctcagctgagtcggaggtggatgacaatatcgttgcctactgctcactggatgagcatgcccagcggcccatgaaggagctgggaatcaaggagaaagaggaactcttccttaacgccatgttggcctactactacgaccagaagcccatcctgtctaatgaggagtttgacaacctcaaggaggagctgtattgggagggcagcaaagtggcggtgctgagctccgaggagaagcgctttttggaggccacgctggcttttcacacccccgggcacgccccca

SEQ ID NO: 1934 - DNA, 397 bp, Chlorella vulgaris
gacccaggcgtccgaccacgcgaccgcaggtagtgagagtgccaccaaagccgccagaatgcagaccaccttcgtgggcaccacccaggcgctgcgcgccaaggtctccacccaggccactcgtggctccaaggtagcaacctccatgcgccgcaccgtcaagtccaagaacgtgaagaccaccgacaccagccagtggtacggtcccgaccgccccaagttcctgggccccttctccgagggtgctgtgccttcctacctgaacggcgagttcgctggtgactacggctgggacaccgccggcctgtccgccgaccccgagaccttcaagcgctaccgccagattgaggtcatccatgcccgctgggccatgcttggcgccctgggctgcatcttg

SEQ ID NO: 1935 - DNA, 354 bp, Chlorella vulgaris
tccgagagaccagcccatcatcagccatgggtatctcccgcgactcgcttcaataaaccccggtcgacgggaggcaagcacaacgcttggcgtatgaagacgaagtatgaactcggtcgccagcccgccatgaccaagctgtcctccaacgtgacattgaggcgtgtgctccttcgccgaggcaactctaagttcacggcgcttcgcctccactcgggcaacttctcctggggctcctacgccctgacccgcaagacgcgtatcctggatatgtcttacaacgcctccaataaccatctggtgcgcacccagaccctggtcaagaacgccatcattcagttggacgcaaccccc

SEQ ID NO: 1936 - DNA, 411 bp, Chlorella vulgaris
accggccgtccaaccacgcaaccggccctttgtgggcatagtggtggcccaacatgtgatgaactctgccaagggcttcctgcttggcaacctgccccccaggtactacctggaacttgtggagatccctgcagccattgccgtgctgggcacgctggccacgctgctgctgaccaggctgcaggacgtgctgccatataccgcttacagggaggctgctgcacttgagggtgcaaacggaactggaatgggtggcacaggaggactggccgcagcagagcagcaggcacagcccaagcctgtgtaggggccatgtcgtctcaccaacacgcgttgaagcagacatgtggaatccacaaatgatgcagcagtacaagcgtgctgtgcaacggcattgtaagccaagggaac

SEQ ID NO: 1937 - DNA, 390 bp, Chlorella vulgaris
cacgacgcgtccgaccgaaacggacaaccatgcagattttctgcaaaacatacatgactcatgtccttgagcttatctccgaggccactgtggccgatgtcaaggctgccatcgaggccagccagggcatcccctgcgatgcgcaccgtgtgatgttctctggtcgccaactggaggaggaggcctccctggccgcctgcggcgtttctgacgacagccagctgtacatcatgatgcgcctgctgggtggtgccaagaagcgcatgaagaatacctacaccaagcccataaagcagaagcacaaacacaagaatatcaaagctcagggtgctcaagttctacaaagtagacgacatcggaaaggtgcagcgcctgcccaatgtttccccc

SEQ ID NO: 1938 - DNA, 301 bp, Chlorella vulgaris
cgctcggccaccagttttgtgccaggcccaacagcagcctgccaaggagcagcctctggagctttcccgtcgtgctgctgcgctgggagccctagcattgtcggcagcatctctacctatggcatttccagcaatcgcggcagaaaatgaggcagttacaacaggtctgaataggtacatccggcggaaaaagtatgacaacatcgaatactacctgccggcgctgctggcagctaaagggcagctcatacggtcaggctaccttctagcccaggatcccaactctgcccgagtgatgctg

SEQ ID NO: 1939 - DNA, 436 bp, Chlorella vulgaris
cgtccgatcgcaagcatgctgggcttcaacatggcggtcactgctgacctggtgaactactccccggggcattgccgaccacctggtaaagtggctgcagctgtttggcttcttgatggggggggccctgttcacagtgtcttccctgatggcgtgcatggaagagacaggcacctggtggcggggctgcgtccccacaagctgggcagacctcaggagcatcagctggctggcagtgttcttcgcccttcaaggctccctgggcttcttcatttttggcctcactttcttcgcggccaaattcagttgggcaggggagcaagcgctcatcgcctacggccagatcttcgcctcggcgtgcttccttcctccggcggtggcatgactgctggagcaggggaaccccgggcaactctaagtagcttcctcatggtgg

SEQ ID NO: 1940 - DNA, 283 bp, Chlorella vulgaris
cccaggcgtccgcatcaaggagctcaaggagccgcccagggacatgaagaatgagaagagcatcatgcacagcggcaacctgtcaatcgatgacgtgatcgagattgcgcgcatcatgcgcaaccgcagctgcgccgcctcgtttgccggcagcgtcaaggagatcttgggcacctgcttcagcgtgggctgcaccgttgagcacgaggacccccgcgaaatccagtcaaagattgacaatggcaaggttaaggtgccccaggattaaacctggaattaccgc

SEQ ID NO: 1941 - DNA, 392 bp, Chlorella vulgaris
ccacgcgaccgcgacccttgatatcctaacgacgtcgagatggtgtcctgcactgcccaagctgcgctgcagagcactgctttcgcggctaagacccgcgtcagcagggtcacccgcagggccgtcgtggtccgggccgagaaggagaacacccagatccaaaaggcggaccgcgttgccaagagcggcggccccatctatgtgaacgccactgatggctctgctctgtcgtaccttgacggcagccgccctggcgacttcggtttcgaccccttgggcctcctggaccccgccaccggctctggcggcttcatctcgcccgagtggctgacttactccgacgtcatccactgccgctaccccatgctgggttcggcgggctgcatcgcccc

SEQ ID NO: 1942 - DNA, 358 bp, Chlorella vulgaris
ccaagcaggggaaagggtcagcgaggagggaaggcgtggtgcagcagaattgatcgcaggggaaggtgatgccaaacgccgcaagctggctgcacggtctacaagcagcttctgaaggctgggaagggcatgtgcctgcgccagagcaaatgaggggttctgtccgccccattgcgctgctgattacgttaagaacatgtcgaactgtgtatcaagggaggggctttttggggcagcctctgtgcacctctcgccaattgtttttgaggggcgtgccattttgccgggttgaaaccaatcaaactcaacagtcgctttactcggtcgggtaagagtgcctgtgcactcaggcatatgc

SEQ ID NO: 1943 - DNA, 429 bp, Chlorella vulgaris
ttacctactctctggtcgcattacctgccacccttataaaatccagctaggtgctgtccagggaccccgagcaccaactgagggccaactccaagctgctcttaagaggtcgaacggcttcggggcctacttttgctgaggagtggtggagttctctcatgtgtcataagatcgtctgcgtcaagtgctggaagcccacctgggttggctgcgggcggcacatcgactctgccttgcagagtgtgccgttggacaagaggtgccactgcaaagcggccacgcagtcagagcatgacgagaaggggcagggagccagctgtgcctgtcagtgaggggagatgctgcgagcgcgcatacccgggcttcgcaacccggtatggctcctgaggtcacatgcccttctgtctcccctgggaagataagaggggg

SEQ ID NO: 1944 - DNA, 385 bp, Chlorella vulgaris
cgtccgagtgcaaggagtagtcctagcttgctgcaagctaatgatgtgatcgttcagcatgaccgacatctttgactcggcccttaacttagaggaggtgcatatacaagaaggttttgaggagggccgaagggatgggcagaggctaggtgaggcagagggcaaggcgctgggggtgcagaaggggtttgaagttgggcacgaggtcggctactactctggctgcacacaagcctggcggctcctgcagcagcgccacccagaagctttctcagccagggttgacaaagctattgccgcgattcacgagctggtgcggggcttcccactaaaggacccccacgattagcgtctgcaagagctgatggactctctgccggggcgg

SEQ ID NO: 1945 - DNA, 410 bp, Chlorella vulgaris
  unsure (1)..(410): unsure at all n locations
gcgtccgaacacaagtccgcttctatatangggttgccaagacgggatgggggttaaacagcagcaaggcgggtgtgcccagctgcgcttgttcgatttttgtgagtgtgcacggtgtgtgtcctccaggtggcacttggttgctaccacggaggggggccctgtgtgcctcgtgcatgggttcttttcttcgtccgtggccgttgcatttgcatgctacccagggccgtgctgcctgggcgtatcgtgacagtcatcctgtctccctcccgccggctagtgtctgatgaacttctaacaaattgccaagcagggacaaacttgatgacgtgtgcgccagtgtgcccgtgttcccatgctttctctgtgtattgacttgtgtgttgaactgctgtaaatccccttactgc

SEQ ID NO: 1946 - DNA, 395 bp, Chlorella vulgaris
ccaggacgcgtccgacccttttttttttttttttgactgctgttgagttacactctcggcaagcaaaagccaacccggatgcagttttggtgtcaactgacaaaatggactaacaagctggatcacagcccagcatgctctcagcctacagccgcggctcactgccagcacacaatcaccccataacaacacaagaaaccctcgcaacctgctgccccgtgttctaagctggttccctacaaattgcactacatgcaagattaccgcactccatgcaaaagtaccaggttggcactgccagctcagccacagatcctctgtgtgcaccacctaccatttttcgcaagtacccccgagtcactctcccagcccccgctcgaagctgaaaacccccc

SEQ ID NO: 1947 - DNA, 434 bp, Chlorella vulgaris
cccacgcatccgagtctgcctgtttgtggggttcccccttaaagtttgcattcaggcaccaaccaaaaatgtccaagtctgagcttgcctgcgtatacgccgccctgatcctggcggatgagggtgccgatgtcagcgccgacaacatcaccgcaatcgtgaaggctgcgggtgtggatgttgagccctactggcccggcctgtttgccaagctggccgagaagaagcgcatcgaggacttcatcgtgaacgttggcgccggtggcggcgctgcccctgctgccggcggtgctgcacctgctgccggcggtgccgctgatgccgccccgccgccaaggaagaagagaaggttcaggacgacgaggaggacgacatgggcttctccctgttcgactaaacccctgacgctttgggtgtctgcaccgctgcaaacc

SEQ ID NO: 1948 - DNA, 394 bp, Chlorella vulgaris
tccgaccacgcgaccgcccacgcgtccgggtgtactctcacatgctccaatgttgacggggaaccgtgtgagcgtgcgaaccgtatcacctaggccggggaacagggtactgtcccccaccgtctgcagcagcggcaactccaatcggccagcagccaaggttcaggccagcgcgggggctactgtggagagcaccaaggcggcgggtgcagcagaggacacagggcgtaggtgcgctgacacgatagctcctgatgagctgtctcgcaccgtgcgcgccatcatcctggcgggtggcgagaccaagaacccgttgtccaagtacaaggccatgccggctgtgcccattgcctccagcctgctgctggtggactgccccctgaacaactgcctg

SEQ ID NO: 1949 - DNA, 410 bp, Chlorella vulgaris
ccgtcgacaacaggtccaaggttcacaagatgcagaccctctctgcccgtttcggcgtccgcgcccctgtctcccggggcacccgccaggtgacccgcgcctccgtggagtggtacggccccgaccgcgccaagttcctgggccccttcaccaaccccccttcctacctgaagggtgagttcgctggcgactacggctgggacacctctggcctgtccgccgatcccgagaccttctcccgctacagggaggttgaggtgatccatgcccggtgggccatgcttggcgcccttggctgcgtcgtgcccgatctgctggaccgcaacggcaccgtcaactttggcgagaacgccgtgtggttcaaggccggtgcccgcatcttcggcgatgaacggctgaactacctgggc

SEQ ID NO: 1950 - DNA, 277 bp, Chlorella vulgaris
  unsure (1)..(277): unsure at all n locations
gacccgcccgtccaacgagcggacgcttccacancnggtcccnggttcacatgctgcagtccctctctgcccgtttcggcgtccgcgcccctgtctcccggggcacccgccaggtgacccgcgcctccgtggagtggtacggccccaatggcgcggcgttcctgggggtcttcaccaatcctccttcctatctgaagggttagtcctctgacgattaccgctgggacacttctggggggtccgtttttacacattccttctcgggaaacccggaggt

SEQ ID NO: 1951 - DNA, 285 bp, Chlorella vulgaris
cgtccgaccacgagtccgcccacgcgtccggtcaatcgatgacgtgatcgacattgcgcgcatcatgcgcaatcgcagctgcgccgcatcgtttgccggcagcgtcaacgagatcctgggcagctgcgtcagcgtgggctgcaccgttgagcacgaggacccccgcgaaatccagtcaaagattgacgatggccacgttgaggtgcccgacgagtgacgctggaagtaccgcccggacccgtgttcgtttcagctgccatgtaacagccgctcgcagaacaaaca

SEQ ID NO: 1952 - DNA, 430 bp, Chlorella vulgaris
gcgtccgactggacatgctctcgtaaatgcctgcgccttgacagcagctggcaacagtcgcgcgcctggtgcagtacacttggcagcttggcactgccatgctgggccgagcacagctctccctgcacatgtgctcgcaccagcagcatcagcaggagcctgctcatgtgctcctcacttctgtctctgggcatggctatctcgaagtggtcgtggtcctgtcgggtcttgcgtccacctgtttgttgtacaacaggggctgccgaggagtactctttccatcggcgcccctttctcttgccgtagggagttccggtcatcccaatctcttttagcgtgcaggcatgcgattttgtggcccttggcgggttgagggtagtgacaactgagaagaatatttcatacagcatttgtgtaactcccagcgacc

SEQ ID NO: 1953 - DNA, 402 bp, Chlorella vulgaris
cactctttgctggcgccggggacggtggtgggccctggcaggctcaccccctcctgggcagctgtgggcgggctcgccggccaaatttgtgccagacttgactaaggatgagaaggccgccatttcgccgctggcgcagtccgtcttccgcctgatcgacgagcacagcgaggagttcctgcccgactcctgggcctacctggaggctgacgcgctgcgggaagtgctcaagccggaggacgcggttgtgcagggggctgctggggagaagaatgccggcatcctctgagagggagggggattgcacggccccttttagctggtgattgctcctggttgcaggcagcattgggttggagaaaatctctccgccctggttgttaagacatatgaaaccccacg

SEQ ID NO: 1954 - DNA, 304 bp, Chlorella vulgaris
ccgactgcagaatgatcttgcgcaaggtgctgtccctgtgccctggctcgcccttcgccatgggcagggagccggcacttccttgcgcttactgttgttgtggcgtgtgcctttctgctttgtgcgcgagtggcctcctggggtctgttcgctgctgcgggctaatggtacggaacacgtgtgcatgacgttctagtgttggtatccgcccccttttgtctttgctgcttctgggctctgagagcctttaggcagggatacctgcgcacttgccccaatggtaattgctgcagcgccaaaacaa

SEQ ID NO: 1955 - DNA, 370 bp, Chlorella vulgaris
ccacgaatccgaccacgcgtccgcttgctacctgcagacaccacccagcaacgatggcctccaccatgagctgcactgccctgcgcgcctcggtcgccaagagggctgccccggcccgccgggggtccgtcagtgtgcacgccgccgcccgccccgtgtggctgcccggctcggagttccccaagcacctgtagaacgtcaagctgcccggcaactttggcgttgaccccctgggcctgagcgcggtccccaagcagctggagtggaatgcggcatctgagcgcctggactgccgctgggccatgcagggcgttgccggcatcctggaacaggagaatgtgcaccccgagcatttcaggtacacctcggg

SEQ ID NO: 1956 - DNA, 57 bp, Chlorella vulgaris
  unsure (1)..(57): unsure at all n locations
cgtcagggtgatccccgtctcgcattagttccagggcantcactatgcaggcaacca

SEQ ID NO: 1957 - DNA, 371 bp, Chlorella vulgaris
cacgcgtcaagcagcggtgtgcacgctgcgagtattggtgtgctaagtaaagcttgtcagcatgggcaagtgcggcaagggaactggaagctttggtctgcgtcacaccaagacgcacggcctctgccgtcgttgcggcaggcgctccttccacctgcagaagagcacctgcagctcttgcggctatcccgctgctaagatcaggaagtacaactggggcaagaaggccatccgcaggaagaccaccggcaccggccgcatggcgcacctcaagctggtgcacaggcgcttcaagaacggcttccgggagggcactgaggccaagcccagggcagttgctgcatgaacagcttgtcaacgacactaaggga

SEQ ID NO: 1958 - DNA, 379 bp, Chlorella vulgaris
cacgcgtcagcagcgcgtccggcttcagccagcctttgcaaaggttcctcgaagtctccacaatggccgccgctatgtgccagacctctgttgcccgggccttcgcccctaaggtggctgcccagaagcgccagcgcgctgttgccgcccaggcctatgttggcaactggctccccggcagcgaccgccccgcctacctggagaagctccctggtgcctacggctttgaccccctgggcctgggcactgagcccaagagcctggagcgctttgtggaggctgaggtgattaacggccgctgggccatgctgggcgttgccggcatgctcggcgtggaggccctgggctacggcgactggtacagcgcacccctctgggc

SEQ ID NO: 1959 - DNA, 342 bp, Chlorella vulgaris
gcggtctgtaaggcgcattgccagaagccagcgtccgccgggcaaaacaagccaccatgaggaacgacgctggcgagattgtggatctgtacatcccacgcaagtgctcgtggaccaacaagctcatcacggccaaggaccacgccagcgtgcaggtcaatattggccacctggatgagaatggcgtgtacactggcagcttcagcacctttgccctgtgcggccaggtccgctccaagggtgaggctgatgccgctatggacctgctctggcagaagaagaaggctgagattggccagcagtgattggagcttgagcgcgggcagcacgctgctgtgcacg

SEQ ID NO: 1960 - DNA, 215 bp, Chlorella vulgaris
acccacgcatcaagaaaaaaaaaaaaaaaaaaaaaaaaaaaaaaaaaaaggagaaaaaacaaaaagttaaaaaaaatggataaacatacatgcgatttaatcattcttccaaattatcacggggtttcagttcattggccgtcttttcaaaaggtcctacatgggaaaacctttgacattatcagcttaggcatccttgttgtatatcctccttt

SEQ ID NO: 1961 - DNA, 239 bp, Chlorella vulgaris
gaccacgcatcacggacgcgtgggtttttttttttttttttttttttttttttttttttttttttttttttttttatttttttttttttttttttataaattttgagtgattaggaggggtatttttagtataactttcataaagggggggacaaatacaaaaagcaggaggacaacagatacaacctcaataaggaaaaaacggacgatgatgaaaagataaacgggggggacaaaaa

SEQ ID NO: 1962 - DNA, 55 bp, Chlorella vulgaris
atctgcttcagccagcctttgcaaaggttcctcgaagtctccacaatggccgccg

SEQ ID NO: 1963 - DNA, 51 bp, Chlorella vulgaris
cgcgtcagcgtaagcgtccgttttttttttttttttttttttttttttttt

SEQ ID NO: 1964 - DNA, 355 bp, Chlorella vulgaris
cacgcgtcaacaaaacctctgagaagtgggcggctgccattggcatattcattggggttgtctcggtggttatcattgtccctcgactgctgcgtcgatgcgttggtgcatgttacagttgacctgcccgccaccccgtctggcatgcgcgatcattgtagctgtggccagtctgcggcggcagtcgcattgccgagtttgcacaggtttctgcttgttgtcgcccgctggcctgttactctcttgttgctgatgttagcaggtcctgccgacaggggatactttggtatggtagcagaactgaggtggaccagaactgggaaatgactgaaagccttgcaagatagtattgcgc

SEQ ID NO: 1965 - DNA, 357 bp, Chlorella vulgaris
cacgcgtcagccaacgcgtccgcccacgcgtccgagaagttcatttatataacctctcattcccctgctttccttgctgaagtgtgaagaacagcttgcagcgtgcagtgccccgaggattgtgaggggtgtgctctcctatttgttgatgctttttgatgctgctcccttccaggcttggcccgctgacatcacctcaaccataacacctgcatggcaaaaaaaaaaaaaaaaaaaaaaaaaaaaaaaacaaaaaaaaaaaaaaaaaagaagacaggaaaataaaattaaaaaataaaaaaaaccattttatttgacaacaaaacataaactaacaaaaaaaaaaggggcggcccc

SEQ ID NO: 1966 - DNA, 416 bp, Chlorella vulgaris
cccacgcgtccgcccacgcgtccgggacagccgtggcaacaacaatggtgatgatgacaacaatgaggagggtgggaggactaggaagtaatgtagcaagtggcaagcacagcggcaggcatggagagctgtctgcaacataaccagagcgagtggcgcaacatttggcaggcccaggagtggagtgaacgtggagagttgtttggaaagccagcaggcaagtgcagtcatccatgcatcgaccgcatgcttatgaagtctcttacagttttggggtgacgtgaaatgcacaattttgtatcatggcatggcgccatcgtaaacgaaccaagaggagctgctctagacatggagagaacttggaaattgtgccgttttaaaatcccggctgcctgcttgcaattgaactcgacatt

SEQ ID NO: 1967 - DNA, 370 bp, Chlorella vulgaris
gacccacgaatcagggtaaactgtgcgctctcatccagggtacggtacgcccctgccctcctcccaggaaaccacaacaacacaccaggctcactgcagccagcgccacacccacggacagcatgtcgtccaacgaggctacgggttctactagtggtgaccgtgatcacgacgctggacagtgcaacggtgccgaggtttgcctgtcccaggagcttacagctgccaaggagggcccgtccagtgagtcggacacagccgcagcccgacaagccgccgaagagccatcctccaagggaatgagcccggtggagctggaatggtgggagtcgccagaatgtatttgccacgagcactgtggacaatacag

SEQ ID NO: 1968 - DNA, 385 bp, Chlorella vulgaris
gacccacgaatcaggtttgtggggttcccccttaaagtttgcattcaggcaccaaccaaaaatgtccaagtctgagcttgcctgcgtatacgccgccctgatcctggcggatgagggtgccgatgtcagcgccgacaacatcaccgcaatcgtgaaggctgcgggtgtggatgttgagccctactggcccggcctgtttgccaagctggccgagaagaagcgcatcgaggacttcatcgtgaacgttggcgccggtggcggcgctgcccctgctgcgggcggtgctgcacctgctgccggcggtgccgctgatgccgcccccgccgccaaggaggaggagaaggttgaggaggaagaggaggaggacatgggcctccccccggtt

SEQ ID NO: 1969 - DNA, 61 bp, Chlorella vulgaris
cgcgtcagcggaagcgtggggccaccacaaggtggccgtgctggatggcggcctgccagcc

SEQ ID NO: 1970 - DNA, 54 bp, Chlorella vulgaris
  unsure (1)..(54): unsure at all n locations
acgcgtcagnnncatggcncccnngnnganggttgcggcccctcctgccgcggt

SEQ ID NO: 1971 - DNA, 57 bp, Chlorella vulgaris
acgcgtcagctgcaactcggccctgaacctggagctgaacgtgaaggcgctgctgcg

SEQ ID NO: 1972 - DNA, 55 bp, Chlorella vulgaris
acgcgtacgcccaagcgtccgtagttatcgaggggacaatgcaggccactatgtc

SEQ ID NO: 1973 - DNA, 357 bp, Chlorella vulgaris
cacgcgtcagcacacgcgtccgtctagctatgactctctcggtgatcacccccagttgcactcgccccccgcatctctgtccccacctttcccaagcgagtacgagctgcaccaaagggacagcccgtggcgcaagttcaagcggtggtggcagcagaacgtgaagatgccccggctgctggggcaggagcagcaggaagtgtccaccccgcccagcggctaccttacacttatacccctgtcagactcccgcctccaaccgcgcagcacgcgcttctcggcactcttcttgctagcgtttgcgctggcagtggcaggctcggtcttcctcctggtgccgcggtgggtgtcggtggg

SEQ ID NO: 1974 - DNA, 436 bp, Chlorella vulgaris
acccacgcatcagcttgccacctgcagacaccacccagcaacgatggcctccaccatgacctgcaccgccctgcgcgcctcggttgccaggagggctgccccggcccgccgcggtgccgtgaaggtccaggccgcggccaagcagatcccccactggctgcccggcaccccccgcaaggactacctggatgccgctgacctgccaggcaacttctcctttgaccccctcaacctggccaccaaccccactgcgctcacctggttccaacaggcggagctgcagaacgggcgctgggccatgctgggtgttgccggcatgctgaccccggagctgggtgccaagctgggcggcttcaccggccccgccggcaaggttccatgggaataagttgtcaaattacaatttcggggcccccgcccccacactggaggccat

SEQ ID NO: 1975 - DNA, 382 bp, Chlorella vulgaris
gacccacgcatcagcaaccgtgctggcagcagctcccgcacgacctctcacccaccagtcctagcgaggttagcaggggttcaccatgaaccaggcaatctatgtctctctgtctctcattggcctggtggccattgtgggagctggtgttggtgttggtagcggcgtggcactgatcagccagcagccgcaggcgaagactgagccaaccaagcactgagtggttagttgctgtggcatacagcagcggcagcagcagcagcagctagtgctggctagcttggggaagttgcagcttttgcaaaggtgcctggccgtgtgcctacctgacggcccgggtttgggagcgcgagtgccagttctttgccaatggctggctact

SEQ ID NO: 1976 - DNA, 56 bp, Chlorella vulgaris
gcgtcagcgggaatgctgctggagatggacaacaccgagctgctcatgcttttgga

SEQ ID NO: 1977 - DNA, 381 bp, Chlorella vulgaris
tcccgggcggccccacgcgtcaggtaaatccgcattccacctaaaggctaggtgctttgcaccactggcatgcacctgcaacaccgctcatgatttacatcgcccagctcctcgcccagcggtccttcctctttgctcaccgcgctgcactgcacctgcgttcatctgcacgcggtattgtcagcatgccgtccctcccagagctagcctgcgaacggtcaggcgtaacggccgacaaggctttcgccattgacgatgaggacgccaagctgtatgacaaattgggccaggacacctttgtcaagctgtccaccgagttttacaacagagtgtatgacgacagcgaacctgtcgacgcaggcgggtcccagccggtcccct

SEQ ID NO: 1978 - DNA, 327 bp, Chlorella vulgaris
ccacgcgtcagcaacgcgtccggaagcaagcttagcacccacactgtaacctagcccaagccaaaaaaaaaaaaaaaaaaaaaaaaataaaaaaaaaaaaaaaaaaaaaaaataaaaaggggaaataaaaaaataaaaaataaaaaaaaatgaggtatataaaaagtagtaaaaaaaaatttaaaaatatttatattgttattattaataaaaatgggtggtgttttttaaggttttaattttttttttgttttgaggggaatttttttctttttttatttttttttttttttttattttatgtgggttcttttttttatttttttt

SEQ ID NO: 1979 - DNA, 351 bp, Chlorella vulgaris
cacgcgtcaacaaacatttacttaaagatgtcggccgccgctcagaccgtgcctgaggctgtcttgaagaagaggcggagggatgaggagtgggcagcaaagaaggctgctgacgctgctgaggccagcaagaaggccagggctacccgcaaggagatcttcaagcgggcggagcagtatgtgaagcagtaccgtgcacaggaggcggacctgatccgactcaagcggtctgccaagtccaagggcggcttttatgtggagccggaggccaagctgttgtttgtggtgcgcatccgcggtatgaacgacgtggcgcccaagaccaagaagatcctgcagctgctgcccctg

SEQ ID NO: 1980 - DNA, 289 bp, Chlorella vulgaris
acccacgcatcagcccacgcgtccgcccacgcgtccgaaaaaaaaaaaaaaaaaaaagaaaaaaaaaaaaaaaaaaaaaaaaaaaaaaaaaaaaaaaaaaaaaaaaaaaaaaagaaaaaagaggggggggaggtgtgaagggtttgatgttggggtggtcttatatgttttctttttggttttctgtgatgtatacttatttaaattatttggctgttgttttattatgtttgtctgggaattactttggtggtttttaacttgaaaaatttgcatttctctcgttttt

SEQ ID NO: 1981 - DNA, 368 bp, Chlorella vulgaris
acccacgcatcaggttggtggaagggggagagccgcaaaaatggcgtcggacaagaaggctcagaaccccatgcgcgagatccgcgtcgcaaagctcatcctcaactgctgcaccggcgagtctggtgatcgcctgcagaaggcggcaaaggtgcttgagcagctgaccgggcagcagcctgtgtttggcaaggcccgctacaccgttcgccagtgggccatccgccgtaacgagaagatctcctgccacgtcaccgtgcgcggggagaaggccgtgcagctgctggaggccgggctcaaggttcgggagtacgagctgcttcgtcgcaacttctctgacagcggcaactttggctttggcatcaatg

SEQ ID NO: 1982 - DNA, 56 bp, Chlorella vulgaris
cacgcgtaagctcacccaggccactcgtggctccaaggtagcaatctccatgcgcc

SEQ ID NO: 1983 - DNA, 355 bp, Chlorella vulgaris
cacgcgtcaagcaacgcgtccgcggacgcgtgggcggacgcgtgggcggcttcttgaggcgtataacgtcaagatgccgtcccagaaggcttttgccatcaagaagaagctggccaagaaggccaagcagaacaggcctatcccgccctggatccgcttcaggaccaataacaagatcaggtggaacgccaagcgcaggcactggcggaggaccaagctgggcatctaaacggccagcattctcgctttcttgtcggcattgcagcttgggagtgcagacgcctggcctggccgacctttattgttgcggcagcgcagcagcctggcggaaggcagtaacaaccgcagctggggg

SEQ ID NO: 1984 - DNA, 56 bp, Chlorella vulgaris
  unsure (1)..(56): unsure at all n locations
acgcgtaagagaaaagaaccccctgctcagttctacgaggcttgcntcgctgcttt

SEQ ID NO: 1985 - DNA, 54 bp, Chlorella vulgaris
  unsure (1)..(54): unsure at all n locations
acgcgtcagcccaagcagnnncatgatggtggctctccagattctcgcagcgac

SEQ ID NO: 1986 - DNA, 54 bp, Chlorella vulgaris
  unsure (1)..(54): unsure at all n locations
gcgtaaggntgaggagctggnganggagaacgcanngaagaccactgccctcaa

SEQ ID NO: 1987 - DNA, 126 bp, Chlorella vulgaris
cacgcgtcaactaaaaaaaaaaaaaaaaaaaacaaagtaaaaaaaaaaaaaaaaaaggaagaaaatcatacaatcaaataatgccggtacctctaaaggtttaactctaacttatccatggaggct

SEQ ID NO: 1988 - DNA, 432 bp, Chlorella vulgaris
ccacgcgtcaggaggaatcccccgtcgacaacaggtccaaggttcacaagatgcagaccctctctgcccgtttcggcgtccgcgcccctgtctcccggggcacccgccaggtgacccgcgcctccgtggagtggtacggccccgaccgcgccaagttcctgggccccttcaccaaccccccttcctacctgaagggtgagttcgctggcgactacggctgggacacctctggcctgtccgccgatcccgagaccttctcccgctacagggaggttgaggtgatccatgcccggtgggccatgcttggcgcccttggctgcgtcgtgcccgagctgctggaccgcaacggcaccgtcaactttggcgaaaacccccttttggtcaagggccggtgccgcaatcttcggcaatgacgggctgaactacctgggc

SEQ ID NO: 1989 - DNA, 434 bp, Chlorella vulgaris
acccacgcatcagcggacgcgtgggcggacgcgtgggggcggccccgctggcgagggccttgacgccctgtaccccggcgaggcctttgaccccctgggcctggccgacgaccccgacagcttcgcggagctcaaggttaaggagatcaagaacggccgcctggccatggtgtccatgcttggctttggcgtgcagggcctgctcaccggcaagggccccctggagaacctggctgaccacctggctgaccccaccgtgaacaacggctttgccgtggccaccaagttcacccccggcaactgagctctagaacctggctccgcagcagtgatttgaggcatgcccaaacccattagccgctccacaaacttgtgttccccggtggtaccctgttccccaaaaggccctgaaactgcaattttcccggctttga

SEQ ID NO: 1990 - DNA, 433 bp, Chlorella vulgaris
gacccacgcatcagcccacgcgtccggctgtggcctactgcaagcgtggaaagggggagctgaggctcaatggctcccctctggaccttatccagcctgacaccatgcgctacaaggtgctggagcctgtgctgctcctgggcaagcagcggtttgccaacgtggacatccgcatccgcgtcaagggcggcggccatgtgtctcagatctacgccatccgccaggccatcgccaaggcgctagtggccttctaccagaagtacgtggatgagcagagcaagaacgagatcaaggacatcctgctgcagtacgacaggacactgctggtcgccgatcctcgccgctctgagcccaagaagtttggccggcaatggtcccggggctcgcttccagaattcttaccgttaaaactctgggcggctgtcgcctggga

SEQ ID NO: 1991 - DNA, 360 bp, Chlorella vulgaris
gacccacgaatcagcccacgcgtccggtggaatcccccgtcgacaacaggtccaaggttcacaagatgcagaccctctctgcccgtttcggcgtccgcgcccctgtctcccggggcacccgccaggtgacccgcgcctccgtggagtggtacggccccgaccgcgccaagttcctgggccccttcaccaaccccccttcctacctgaagggtgagttcgctggcgactacggctgggacacctctggcctgtccgccgatcccgagaccttctcccgctacagggaggttgaggtgatccatgcccggtgggccatgcttggcgcccttggctgcgtcgtgcccgagctgctggaccgca

SEQ ID NO: 1992 - DNA, 55 bp, Chlorella vulgaris
  unsure (1)..(55): unsure at all n locations
gcgtcaggcnnatgaggcangccgggaatcgagttggccttgagccgacgcgttt

SEQ ID NO: 1993 - DNA, 366 bp, Chlorella vulgaris
ccacgcgtcaaccaacgcgtccgagcgattcgaactaacgcctatccgaggcttcctcgaagacagaagacatcaacatgtctgacggaggggacagcccgaaggccgccgaggcccccgccgccgccgcggctcccgcccccggcgagcccatggacatcaacaccgccatccagctggtgctcaagaaggcgctggctcacgacggcctcgcacgcggcctgcacgaggcctgcagggccattgagcgcggccaggcgcagctgtgcatcctcgccgacgactgcaaccagcccgactacaagaagctgattgaggccctgtgcgccgagcagagcgtcaacctcattgccgtgcccgacccca

SEQ ID NO: 1994 - DNA, 53 bp, Chlorella vulgaris
  unsure (1)..(53): unsure at all n locations
gcgtcagcccaagcgtccgcccacgcgtccgggcgaggtcanggaggactaca

SEQ ID NO: 1995 - DNA, 393 bp, Chlorella vulgaris
acgcgtcaagcaacgcgtgggctagaactagtcagcgattcgaactaacgcctaaccgaaggttcctccaagacagaagacatcaacatgtctgacggaggggaaaacccgaagggcgccgaaggccccgccgccgccgccgctcccgcccccggcgagcccatggacatcaacaccgccatccagctggtgctcaagaaggcgctggctcacgacggcctcgcacgcggcctgcacgaggcctgcagggccattgagcgcggccaggcgcagctgtgcatcctcgccgacgactgcaaccagcccgactacaagaagctgattgaggccctgtgcgccgagcaaagcgtcaacctcaatgcccttccccaacccaaaaaccttgggcaattg

SEQ ID NO: 1996 - DNA, 367 bp, Chlorella vulgaris
cacgcgtcaacagacgcgtggggaactaacgcctatccgaggcttcctcgaagacagaagacatcaacatgtctgacggaggggaaaacccgaaggccgccgaggcccccgccgccgccgcggctcccgcccccggggaacccatggacatcaacaccgccatccaactggtgctcaagaaagggctggctcaagacggcctcgcacgcggcctgcacgaggcctgcagggccattgagccccgccaggcgcagctgtgcatcctcgccgacgactgcaaccagcccgactacaagaagctgattgaggccctgtgcgccgagcagagcgtcaacctcattgccgtgcccgaccccaagaccctggg

SEQ ID NO: 1997 - DNA, 361 bp, Chlorella vulgaris
acgcgtcaagcattgtgcaaaatggcgagcaaggtgtccggcgaggtgctgcgtgagggtatcgctggggtgctggagggctccaagtccaaggcccgcaagttcacggagaccgtggagctccagattggcctgaagaattatgacccccagaaggacaagcgtttcagcggctctgtgaagctgccttactgcccccgtccccacctgaaggtgtgcgtgctgggtgaccacaagcactgcgaggaggcccagaacgcgggcattgacgcgatgagcgtggatgacctcaagaagctgaacaagaacaagaagctggtcaagaagctggccaagcagtatgccgccttcctgtcctctg

SEQ ID NO: 1998 - DNA, 318 bp, Chlorella vulgaris
gacccacgcatcagcggacgcgtgggcggacgcgtgggaaaaaaaaaaaaaaaaaaaaaaaaaaaaaaaaaaaaaaaaaaaaaataaaaaaaaaaaaaaaaaaaaaaaaaaaaaaaaaaaaaggaaaaaaaagggggggaaatataaattattgggtttttacttgtattttattggtttctttttttttctttttttttttcgtttatttttatttttttggctttttttttttaattttttgttttttaaaattttttttttttcaaatttgtttccttttgaaaatatccccttttttcgattattcttattttc

SEQ ID NO: 1999 - DNA, 382 bp, Chlorella vulgaris
gacccacgaatcaggccagcctttgcaaaggttcctcgaagtctccacaatggccgccgctatgtgccagacctctgttgcccgggccttcgcccctaaggtggctgcccagaagcgccagcgcgctgttgccgcccaggcctatgttggcaactggctccccggcagcgaccgccccgcctacctggagaagctccctggtgcctacggctttgaccccctgggcctgggcactgagcccaagagcctggagcgctttgtggaggctgaggtgattaacggccgctgggccatgctgggcgttgccggcatgctcggcgtggaggccctgggctacggcgactggtacagcgcacccctctgggccgtgactggcggcaaa

SEQ ID NO: 2000 - DNA, 445 bp, Chlorella vulgaris
aattcgccggctgacccacgcatcagcccacgcgtccgcccacgcgtccggctaaatagacacccctggccgagtaagcggagaggcccggcctcgagataccacctgggagttgacgaagaagctccagaacaagaggaatgactcgtggtaaccagcgagagatagaccgcgctcgtgctcagaagaggaaggagaaggcgggtgctggcaaggacaaggaggacgggctcacgcctgcgcagcggaaagaacgggacgcgaaggcactccaggagaagcttgcaaaaaaggcggctgaaggggaaaagggtaaaaagtagtaaaggggcatgtacgagctaaccactgttttatatacgattctttcaagcatgcctggttaattcaattcgggtctaattacgggacagaacccaggcatgggggttaggcagtgtcagca

SEQ ID NO: 2001 - DNA, 439 bp, Chlorella vulgaris
gacccacgcatcagcgcgttagcagccgacagccgcacaatatggcggagtcggtgcagaccttcgggcgcaagaagaatgcagtggctgtggcctactgcaagcgtggaaagggggagctgaggctcaatggctcccctctggaccttatccagcctgacaccatgcgctacaaggtgctggagcctgtgctgctcctgggcaagcagcggtttgccaacgtggacatccgcatccgcgtcaagggcggcggccatgtgtctcagatctacgccatccgccaggccatcgccaaggcgctagtggccttctaccagaagtacgtggatgagcagagcaagaacgagatcaaggacatcctgctgcagtacgacaagacactgctggtcccccaatcctcgccgctctgagcccaagaagtttggcggtcatggtgccc

SEQ ID NO: 2002 - DNA, 57 bp, Chlorella vulgaris
  unsure (1)..(57): unsure at all n locations
ccgcgtcagcggtagcgtgggcggncgcgtgggggcgcgtcttgccttttcntgggg

SEQ ID NO: 2003 - DNA, 357 bp, Chlorella vulgaris
ccacgcgtcaggagctttgtggaggctgaggtgattaacggccgctgggccatgctgggcgttgccggcatgctcggcgtggaggccctgggctacggcgactggtacagcgcacccctctgggccgtgactggcggcaaggcgacctactttggcgcggagctgcccttccagttcgacctgggcaccctcttcgccattgagatcggctcgttcgccattgccgagtccctgcgcggcgccgctgagggcgagaagagctgctacccgggcttcaaccccctgaacctcttcgctgagggcgacgctgtctttgacggccggaccagggagatcaagaacggccgcctggccatg

SEQ ID NO: 2004 - DNA, 55 bp, Chlorella vulgaris
  unsure (1)..(55): unsure at all n locations
cgtacggggcaggcaggtggtgtcgctcanctacannngtggctttgtgacgatg

SEQ ID NO: 2005 - DNA, 351 bp, Chlorella vulgaris
cacgcgtcaacaaccagcagatgctctttgttgctgggggcgtgcaggaggggcggttaggggagggttggcgcctggagcagctggatgctgcttcccttgcccttaggcagatgctctagggtgcagcaacaaggggtgttggcggtggatgggggccgggtcagcaggctggtaagcagctctggctggccgtgaaccgtccacggggaaggtgtcttctctgttagccaggtccctgggttggatgctgtgtgttaagtgtggttgtgtggtgcgtgtgcggcgtgtgggtggtgccctagtgggctggcttgcatgttgtcactctgttgtttcttacctctgttg

SEQ ID NO: 2006 - DNA, 352 bp, Chlorella vulgaris
  unsure (1)..(352): unsure at all n locations
cgcgtcaacgactcgcaatagttccagggcaatcactatgcaggcaaccatgatgaagaccttcggcgccagcctgcgcaaggctgtgcccacccagggcaagggcacccgccaggtgacccgcgcctccgtggagtggtacggccctgacagggccaagttcctgggccccttctctgagggctccacccccagctacctgaagggcgagttcgccggcgactacggctgggacactgctggtctgtctgccgatccccaaaccttcgctgcctaccgcgaggttgaggtcatccatgcccgctgggccatgcttggcgccctgggctgcctgacncccgagctgctgcaa

SEQ ID NO: 2007 - DNA, 94 bp, Chlorella vulgaris
gtgttcctcgtctctcaatacttccactgcactcactatccaagcaactatgatgaaaaccttctgcaccatctttctcaatgttgttcccacc

SEQ ID NO: 2008 - DNA, 372 bp, Chlorella vulgaris
acccacgcatcaggctctgcaccatggccgtcgcaatgatgtcctccctgtctcagcgcaacggcctggttgccaaggtgcagaagcagaccggcgttagggctgttgctcgcaccaggaccgtcacaaaggccatcagcgacgttaacctgattgtgggcggttccaccattggcgccctgattttgggcaggagcctgctgcctgtgcaccgcgcataccttgccaaggctggcctgcccaagcagaacggcgtgacccacgtggacgctggcgacaagaggtccgcggaggtcagcttcgctgccaagtccaacgaccctgctggcttcaccatcattgatgtccttgcctggggcgcactgggccaag

SEQ ID NO: 2009 - DNA, 436 bp, Chlorella vulgaris
acccacgcatcagcccacgcgtccgcccacgcgtccgcccacgcgtccgaaagataccatcttggaacaggcgaggtacttttcgttccaaggaagctctggatagcctacgcccaaaacccactgagctgcttggtgtaggatgaggtgctgagttgcgaaatcaccaaggcgttatgtaacttttgtgtccaccaacatccagcccggcgacctgttgcattgtcggtctggttgaatctccaggctgtctgcctctggaggccacgctgagggggcagcactgaggcgctgtcaccgggtgtgctgcaagcggactgtgctggctgtggagcacatttatgtacagccttgggattgggttagccagaaccacaatcaaccaatcccaattgccttagcctaattgtggtggaaatgtccaagaggaaggaaa

SEQ ID NO: 2010 - DNA, 53 bp, Chlorella vulgaris
gcgtcagcccaagggtccgcccacgcgtccggcgcagtccatcagcatgtgta

SEQ ID NO: 2011 - DNA, 370 bp, Chlorella vulgaris
aaccaagccttaggatgaatctccgtcctgcttaggaattaaggtttgctcgttgaccttgccatggcacttgcagatgttttacaaaagtcggtctctgcttttcttggaggtgtgacacttgtgactggcctctgggttggctcaacggtcgtctccttgtattacaacaaccggcagcttcaagagcagcagaggatagcggaagccacacggacagatgacaaggagtgagagttcctgggctggcagagggtttgttccatggccttgttagcttcgtcctgtaccttgcaggggtcggtggcttgtgtacttgttaggtgtgccactgccattccatggcagaccttccctcgttgttgggcaa

SEQ ID NO: 2012 - DNA, 56 bp, Chlorella vulgaris
gacccacacgtcagcgcgaggactatatcaacaacctggtccgtgccatgaactga

SEQ ID NO: 2013 - DNA, 361 bp, Chlorella vulgaris
acgcgtgggggcgagatcagcatcatgtaccagagcccccgcggcgacctgctggacacccgcctgctacgcgccactgtgctgaagggcgtgctcgaacagacctctgacaacaaggtgaacattgtgaacgccgacatcctggccaagaagcgcggcctgcgtgtgaaggagaccgtggtgcagacggacggcgaggccatcctgcaggagatgacggtggcgctgtccgccaagaagtccaagttctcggtggcaatggacggccagagcgtgagcatcagcggcaccgtcaagcccaccggctcattcatcacccgcattggcagctttgatgtggacctgggcatggagggccaag

SEQ ID NO: 2014 - DNA, 378 bp, Chlorella vulgaris
cgaaccacgcatacgccgtctcgcaatagttccagggcaatcactatgcaggcaaccatgatgaagaccttcggcgccagcctgcgcaaggctgtgcccacccagggcaagggcacccgccaggtgacccgcgcctccgtggagtggtacggccctgacagggccaagttcctgggccccttctctgagggctccacccccagctacctgaagggcgagttcgccggcgactacggctgggacactgctggtctgtctgccgatccccaaaccttcgctgcctaccgcgaggttgaggtcatccatgcccgctgggccatgcttggcgccctgggctgcctgacccccgagctgctgcagaactccggcgtggccaac

SEQ ID NO: 2015 - DNA, 359 bp, Chlorella vulgaris
ggctgtatcacttctccttatcctgccttcaacagatacagttgcactaagatggcccccaccgctgtcatgcagctgcaactgcagcaggttcgcaaggtcactcgccaggccgcctcccataaggcctttgtggctgcccctgtcgccaggaaggccagcgtgcagcccgcagccatcagccgacccgcccccagccggagggtcgctgtcaaggctgttgccgaggccaaggcccctgcagcaaccgcagccagcacccaggagtggtacgcctgcgtggccagcgccgagtttttctacaacgacgtccagaatgagcctttcgctgagcagctgcgtgagaagaagaagtggtt

SEQ ID NO: 2016 - DNA, 58 bp, Chlorella vulgaris
  unsure (1)..(58): unsure at all n locations
gctcgacncaagcgtcagcccacgcgtccgtgcttctgtgggctgtgagcagcagggg

SEQ ID NO: 2017 - DNA, 374 bp, Chlorella vulgaris
  unsure (1)..(374): unsure at all n locations
acccacgcgtcaaacggacacgctgggcggacgcgtgggcnggacccgtggcgagatgcagatggcactgctggccatcaagcttactcgcttgaagaacccaacacctttgccaacccgtggcgggcgcatgatcaacctggggctgatcgatcgagtgaggaccttgaggcgctggatgcagatgatgcccgacctgccagagcttgaggagaatgtggatgacggcagccgcatgaaggacgttgactaaccacccagcattagaaaggtgccatgctgggccttggatggggcagcagccagcagatggtcatctgaaaagctagcggggctgacgccctgagccagccctgctactcgtaccagtctca

SEQ ID NO: 2018 - DNA, 387 bp, Chlorella vulgaris
gacccaacgcgtacacttcctcccatgcacacagcgttgcagtaggggcagggtgggtagacgttggctgtgccaggctgcggggccacaacagggggagggtgctcctaggcaggctcctccccaagcaggcagacgcttcaccccggcagctgattttaaccccaacgtgaagctggaaaaaatggatgagatgacagacgatgtgtgggagggctctggagtagttcagctagaagagctggaccaggacgaaccttcagacctcaagaaggtggcgctattggttgctggggacgctgctgccctactgctgtttgcggtcattggccggttgaaccatggggaagcagtcacagcgggcgccctgttggaaaaagcctcaac

SEQ ID NO: 2019 - DNA, 394 bp, Chlorella vulgaris
agcggaaagcaccaagatggcgaaggacaagtctcgctccgccgaggtggtgacccgcgagtataccattaacctgcacaagaggctgcatggcataaccttcaagaagagggctcctaaggccatcaaggagattaagaagtttgcccagcaacaaatgaagaccagcgacgtgcgcgtggacgtcaagctgaacaaggccgtgtggagccagggcatcaagaacgtgcccaaccgcctgcgcattgtgatccagcgcaagcgcaacgaggacgacgacgagaaggaggagatgttctccctggtcaccctggccgaggaccagagcagcaagggcaagggcgtggtggtcctggaggcataaacacacacacgcgcctcccggggggaactg

SEQ ID NO: 2020 - DNA, 418 bp, Chlorella vulgaris
cgacccacgcatacggcttggcgcccttggctgcgtcgtgcccgagctgctggaccgcaacggcaccgtcaactttggcgagaacgccgtgtggttcaaggccggtgccgccatcttcggcgatgacgggctgaactacctgggcaacccctccctcatccacgcacagtccatcgtggccgtgctgctctcccagattgtgctcatgggcctggttgagggctaccgcgtgaacggcggccccgctggcgagggccttgacgccctgtaccccggcgaggcctttgaccccctgggcctggccgacgaccccgacagcttcgctgagctcaaggtcaaggagatcaagaacggccgcctggccatggtgtccatgcttggctttggccttcaagggccggtcaacggcaagggcccc

SEQ ID NO: 2021 - DNA, 390 bp, Chlorella vulgaris
cccacgcgtccggtcaaggacctggtgcagctgctgtttgagaccgcgctgctggcctcaggcttctcgcttgacgaccccaacacctttgccaaccgtatccatcgcatgatcaagctggggctgtcgatcgatgaggaccttgaggcgctggatgctgatgatgctgacctgccagagcttgaggagaatgtggatgagggcagccgcatggaggaggttgactaagcaactagcattagaaaggtgccatgctgggccttggatggggcagcagcgagcagatggtcagctgaaaagctagcggggctgaggccctgagccagccctgctgctcgtaccagtctcaaacttgtagttagtgctggttatgtcgtcttcttttccccg

SEQ ID NO: 2022 - DNA, 55 bp, Chlorella vulgaris
cgacccaagcgtcagcggacgcgtgggcggacgcgtgggcggacgcgtgggcgga

SEQ ID NO: 2023 - DNA, 336 bp, Chlorella vulgaris
ccacgcgtcaacgctgacagtgtttcgctcctcactaacatccagccgccaaaatgcagagcttcgctgtcaagcccaccctactgcgcggcgcagcccgccccaggctggttgtgagggccgaggaggctgctaccgctgccccagccaagaagcccgacgttggtccgaagcgcggctccactgtccgtattctgcgccccgagtcctactggttcaaggagaccggcaccgttgtgtccgttgaccagactggcatccgctatccaatggtggtgcggtttggcacccgcgtgtcgtactctggggttgccaccaacaactttgcccttgacg

SEQ ID NO: 2024 - DNA, 352 bp, Chlorella vulgaris
cccacgcgtcagcaccatcccacggtgcttgggatagctgcaggggtgtcaagcaggcatccgcaccatgcctttcaagaggtacgtggagattggccgtgtggccatgattaactacggccctgagtacggcaagctggtggtcatctcagacgtggtcgaccagaacagggccctgattgaccggcccgacgagacccgccgtgtggagaacttcaagcgccttgcaatcactgacttcaaggtggagattccccgcctggccaagaagtccgtgctgaagaaggccctggaggaggctgatgtgttcaacaagtttgctgctagcgcctggggccagaagctggccaag

SEQ ID NO: 2025 - DNA, 378 bp, Chlorella vulgaris
aattcgggtctcgacccacgcatacgcccacgcgtccgcccacgcgtccgcagcaacactgggaggacttctgcagaagggatcatcaccgccatatcaagtcctaggctagtgtacgaccctcgacacccttgtaaacaaggcaggatggccgacgaccctgagctggaagccatcaggcagcgccggatgcagcagatgatgggtcagtatggtggtggcaaggcgccagcctctgaggaagaccagcggcagcaagaggaggccagggagcaagcggaggagcagcgaagaagcatgctgatggggctgctgcagccggcggcgagggagcggctggccaggatagcgttggtgaagccagacaagggaacccgg

SEQ ID NO: 2026 - DNA, 419 bp, Chlorella vulgaris
gacccacgcatacgcggacgcgtgggtttagttaggtgcagcaaccatggggcgccgcccagcaaggtgctaccggcaaatcaaggggaagccgtaccccaagtctcgcttctgccgtggtgtgcctgactccaaaatccgcatctacgacgtgggcgcaaagaagtctggcgtcgatgccttcccttactgcgtccacatggtcagctgggagaaggagcacatctcctctgaggctcttgaggcggcccgcattgctgccaacaagtacatggtgaagaatgcgggcaaggacgcgttccacctccgcgtgcgcgtgcaccccttccacgtgctgcgcatcaacaagatgctttcgtgcgccggggctgataggctccagaccggcatgcgcggcgccttcggcaagccctttggcg

SEQ ID NO: 2027 - DNA, 367 bp, Chlorella vulgaris
ccacgcgtcaacgttgctcggtgcgcgtctcggccttcaaaccactcagaatgcagaccgcccttgccaccagcttcgccaaggcccctgtggccacccgcaccgctggtgccaggcccgcacgcaccgttgccgtggtgtgccgcgcgcagcagcagcagaaggccgcagcagccctggccgccgtgcccgccctgctggccgcaagccctgcctttgctctggttgatgaccgcattgccactgagggcactggcctggctctcggcgtccacgaccccgccctgttctttgccattgctattgtcttcaccggtgtgtgggcagtgttctactctggggccaagagcctgggcggcggcaaggg

SEQ ID NO: 2028 - DNA, 384 bp, Chlorella vulgaris
agaccacgcgtccgggcggccccgctggcgagggccttgacgccctgtaccccggcgaggcctttgaccccctgggcctggccgacgaccccgacagcttcgcggagctcaaggttaaggagatcaagaacggccgcctggccatggtgtccatgcttggctttggcgtgcagggcctgctcaccggcaagggccccctggagaacctggctgaccacctggctgaccccaccgtgaacaacggctttgccgtggccaccaagttcacccccggcaactgagctctagaacctggctccgcagcagtgatttgaggcatgcccaaacccatgagccgctccacaaacttgtgtaccctgttgtagcctgtccgcgagaaggcct

SEQ ID NO: 2029 - DNA, 354 bp, Chlorella vulgaris
ttgtggtgcgggcacttggactgcaaccatgccgaagcagattgaggagatcaaggagtttctcctcaccgccaggcgcaaggatgcccggtctgtgaagatcaagaagaccggcgatgtgaccaagttcaaggtccgctgctcacggtacctgtacaccctctgcgtgaccgactccgacaaggcagacaagctcaagcagtcgctgccgcccggcctgcatgtgcaggagatctgataagtggagtcgttgtagcagtgatgagtagcgcatgcagcagacggccggaggttgcaacgcgcccatctgtcgccacctgtgtgtagcaacctgctgggcggggtgttcaacaa

SEQ ID NO: 2030 - DNA, 386 bp, Chlorella vulgaris
ccaagcgtaaaaccagtcagtcaacctccgccgcaaacatggctgaggagactgcagtgcacggacccaagggggtgaaggatgtccccgcagaggctttcatcaaggctttcgctgcgcaccttaagaagaatgacaaggtgaccctccctgactgggttgatttcgccaagaccggcgctttcaaggagctggcgccccttgaccctgactggtattacatccgcgccgccgccattgcccgccgcgtgtacatgcgccagggcctgggcgtgggcgccttccgccgcatcaccgccgagggccagcgccagatggaccttgtggctggcatcgtgactgttgccaggttccactacctgttagcgcaacggagtacggcaagc

SEQ ID NO: 2031 - DNA, 429 bp, Chlorella vulgaris
aattcgggtctcgacccacgcatacgcggacgcgtgggctgctttgcatgaagacatataagtgcaggaccgaggcacacaatttgctggagaggccggtggcagtgtatgttgtggatggctgaatcctgacctgccctctgctgtgccccctcaccgatcatatcgccttaagtgatatgatcggggatggaaccgtgattccttccctgctgcagattggcatgggtgcctttgtcaacttcttcttctccggcttcatccttggcaaggtccccttcgccctgtcccccaagttccgcatgatgctccagcgaggcattgacctgccgtctctggatgtgtcctacttcacgtctctgtcctactacatcctgctgctgtttggcctgcggggggtcatgatgcctgtgttccgggacgatgcga

SEQ ID NO: 2032 - DNA, 377 bp, Chlorella vulgaris
cccacgcgtacagctagcttggggaagttgcagcttttgcaaaggtgcctggccgtgtgcctacctgacggcccgggtttgggagcgcgagtgccagttctttgccaatggctggctacttctgtggcaaagggtttggcacaaagtgtcaataaggtctcggggcggtggctggctgggtggtgatgctcggtatcccatgtgggcagtgcctgcctgcctgtccctgttaatggaggcttggcagtgtagagctgttcattgtgtgggcttgactccatgccatggctgtcatttggtatctgtatgttgtaaagttgagggcagggttcaagcaaggactgtaagctaacaacataaaagaaaaaaccaatggc

SEQ ID NO: 2033 - DNA, 302 bp, Chlorella vulgaris
cggacgcttgggcggacgcgtgggcggacgcgtgggaaaaaaaaataaaaaaaaaaaggaaaaataaataagaaaaaaaaaaagacggaaactctaaagattataaggcttaaataggcttgcattcaaattgattcctctttgatgttgtcttcaaattgtcaattcactggtatcgtgtttttacactttcttcaatgggaatgcctttcttttactcactttattccggttaaatcaatgcgtcattactcctgctggcgttttcgcgacaagccctttacggattccgttttcttata

SEQ ID NO: 2034 - DNA, 364 bp, Chlorella vulgaris
aagcggcagcggtggctgcggctgcaccccaagaccgacgcgccgtcgcagaagaagaagtggcgcttcctgcagaagtactggcaccgcggggcgttcttccagaacgaggcggacacaggggagggggaggacgagggggtggtcgcaaccatccagcggcgcgacttctcggcgcccacgggggaggataagatggacaagaccatgctaccacagatcatgcaggtgaagaactttggccggcgcgggcgcaccaagtggacgcacctggtgtcagaggacaccaccaactttgagagcccatgggcacagaatgacgcgcttcgcctgaagtataaccaaaagatggcagccgctgaac

SEQ ID NO: 2035 - DNA, 55 bp, Chlorella vulgaris
  unsure (1)..(55): unsure at all n locations
cgacnaacgcgtacgcctgattaaggccctgaactcagtcatcagccactatcgg

SEQ ID NO: 2036 - DNA, 57 bp, Chlorella vulgaris
cgaccaacgcgtacgattctcgccgtgtcttggtagacggacaagctgagtcggcca

SEQ ID NO: 2037 - DNA, 380 bp, Chlorella vulgaris
ccacgcgtcaggccattagagccatacccttgtccgctccgcgtgcgtggttggcgtgcactgggatagaccaggcaccatggcgcaccttgcctgtgcattcaaaagcggccctctctacaccagccgcagcagcagcttcaagggcagccagcgaaaactgcagttcaacaagggacaggccgttgtggtgatgcgcaagaagggcatccaccctgtttggcatgaggagtctaaagtgttttgcaacggcgaggaggtcctggtgaccagcggcacaaaagacagttacacagtcgatatctggtcaggcaaccaccccttcttccagggcgcagccaacactgtggttactgatgaaggcagcgttaaccgcttta

SEQ ID NO: 2038 - DNA, 354 bp, Chlorella vulgaris
aattcgggactcgacccacgcgtacgcccacgcgtccgcgcgttagcagccgacagccgcacaatatggcggagtcggtgcagaccttcgggcgcaagaagaatgcagtggctgtggcctactgcaagcgtggaaagggggagctgaggctcaatggctcccctctggaccttatccagcctgacaccatgcgctacaaggtgctggagcctgtgctgctcctgggcaagcagcggtttgccaacgtggacatccgcatccgcgtcaagggcggcggccatgtgtctcagatctacgccatccgccaggccatcgccaaggcgctagtggccttctaccagaagtacgtggatg

SEQ ID NO: 2039 - DNA, 367 bp, Chlorella vulgaris
cgacccacgcgtacgcccacgcgtccgggcgcgcacaggtatcgccgtgggccttaccaagggccatgtggtcaccaagaaggagaaggccgtgaggcccgctaaccgcaaggggaggctgtccaagcgcgtcaagtttgtgcgtgacatcatccgcgaggtggccggccaggcgccctacgagaagcgcgtgattgagctgctcaaggtcggcaaggataagcgcgccctcaaggtctgcaagaggaagctcggaacccacatccgcgccaagaggaagagggaggagatgagcgccctgctgctcaaggtcgacaagaagtgaatgcagccggctgccagcctgctggtactgggcttgctaatg

SEQ ID NO: 2040 - DNA, 396 bp, Chlorella vulgaris
cccacgcgtaagaccacgcgtccggttgtactggcttttatcatgtgagaagtgtgcagacagggcagctcgtcttgtcacagtgctcatgatgtttggtagatgtctgcagccttgtaacagccgcctgggggttggggccctgtgggctggacggaatgttggtgtatgtcgaggcggctgggatggcagcgtgctgcgctgcactaacaggagttcttcgtgtagcctcggttgtaagcaaagttagagggagggtgctatgctcaggggggcactatcaatttggggcttacacagtgtgtcagaggcttgagtccaggaactcacttgtcaagcctttgatgctaggttgaatattgtggtcggcaggaaccagcacctcagtggtgcttg

SEQ ID NO: 2041 - DNA, 57 bp, Chlorella vulgaris
cgacccacgcgtacgcccacgcgtccggaaacatggcacccaagaagaaggttgcgg

SEQ ID NO: 2042 - DNA, 401 bp, Chlorella vulgaris
cgcggacgcttgggcttccagtccaagttcctgatggtgggaggttactacgaccccaccggccagtggctgcccagcgccttcaggaccgaggtggaggcctacgaccccaagaccggtgactggacaacgctggcccccatcccccaggcccgaggcgacaatgcgctggtgcagctacccggggaccgcatgatggtcatgggcggcgagaccaacacccagacacgcaccgaggttgcgaccagccaagtggacctgtacctagctgcctacgacctgtgggtgcccatggctcccatgccggagccccgcttccgctttgacgccgcctttgccaacggctttgtgtacgcgtttggaggccaggcatcctcggtgtgcgacagcgccgaaacctg

SEQ ID NO: 2043 - DNA, 380 bp, Chlorella vulgaris
gtcggctcctcttcctgcctgcctgcaggttcaaggtgctcaagcgctccaaccccgaggaggccgagaagctgaagaacaagctggaccgagacatcaagctgcgccacgagcgcctggtggagtgggccaagcccaaggccaagcccgccgaggagcagtaggttactaacaagtttgtcagggagtgagtcgggcgcccggctgagagacccaagccccagagaagctggtagcgcagaggaaggtcaccctcatgggctgggctggagcttggagggtatttatctatcgataaggaggaagtgtggtgagttcattccatgtacctgcccgtgaggcgcttcttagtggaaaccaacaaaccttcgtggtgctgg

SEQ ID NO: 2044 - DNA, 406 bp, Chlorella vulgaris
gccttcggcggacgcttgggcgacaacaggtccaaggttcacaagatgcagaccctctctgcccgtttcggcgtccgcgcccctgtctcccggggcacccgccaggtgacccgcgcctccgtggagtggtacggccccgaccgcgccaagttcctgggccccttcaccaaccccccttcctacctgaagggtgagttcgctggcgactacggctgggacacctctggcctgtccgccgatcccgagaccttctcccgctacagggaggttgaggtgatccatgcccggtgggccatgcttggcgcccttggctgcgtcgtgcccgagctgctggaccgcaacggcaccgtcaactttggcgagaacgccgtgtggttcaaggccggtgccgccatcttcggcgatg

SEQ ID NO: 2045 - DNA, 403 bp, Chlorella vulgaris
cggacgcgtggggaggaaggcagtgcatctgctgaggaccgaaacggacaaccatgcagattttctgcaaaacagacaggactcatgtccttgagcttagctccgaggccactgtggccgatgtcaaggctgccatcgaggccagccagggcatcccctgcgatgcgcagcgtgtgatgttctctggtcgccagctggaggaggaggcctccctggccgcctgcggcgtgtctgacgacagccagctgtacatcctgatgcgcctgctgggtggtgccaagaagcgcaagaagaagacctacaccaagcccaagaagcagaagcacaagcacaagaagatcaagctcagggtgctcaagttctacaaggtagacgacagcggcaaggtgcagcgcctgcgcaa

SEQ ID NO: 2046 - DNA, 245 bp, Chlorella vulgaris
ccacgcgtcacccatcttgcgctggtagcagcaagctcggcaggatggtgcggatttcggtgctggggaatcccctgattcagtgctgtgcgatgcttgtttcccgtgacatagcggtgtctcaggcacctctgcttgggtcgtcgggggtcatagggtcaagttcctgggcgcgttctatgagggctccatggctagatatgttatgggcgaattcggcggtgactactgctgggatactgctg

SEQ ID NO: 2047 - DNA, 61 bp, Chlorella vulgaris
cgaccaacgcgtacgcccacgcgtccgcagtaccctatacgtcgtttacaatggcagcccg

SEQ ID NO: 2048 - DNA, 393 bp, Chlorella vulgaris
ccaagccttagagggccggcttggaattcaaccaccaaatgctgcccaaggcattaagggctgccgccaagcagtgccgcagcgctgctatccccgcaggtgcagccttggccactgctggccgcagtagtgttgcaactctcgctggcttgctacaccatggcagacccatggccagtacagctctcctgtgccttgctgcgacgaccatgggcggctcagtagcatttgctgcctcaaaccaggagcgctccttcattatggtcaagcctgatggtgtgcacaggggtctggtgggggagatcattcgacgctatgaagcgaagggatacaagctagttgggatcaaggttcttaaaccctccgccgaccttgctaagctacactatgctg

SEQ ID NO: 2049 - DNA, 372 bp, Chlorella vulgaris
accagaagcaaggttgcaaaggccccccgcaaggaaaacctgaaccaaaaggctgccaagcagacggaggacaaaaagcggaagaatcccctgatggatgagaccgtggggcagaagcggaccatcaagtccatcaaggcccgtgaggccgagcttcggcagcagggcgtgagcgccgccagggcgggcaagattgccgcggggatggtcacgggcgtgaagagcaaaaagcagaaaaagagaaaggccggcgagaagggcggcgagaacggcggcggggacggcggcttgtttggtggcgatggcatcgggaagccgtcggcgttagggccttcaaaggtgtatgctggcggcgccaagaatgggaagctc

SEQ ID NO: 2050 - DNA, 396 bp, Chlorella vulgaris
gactcacgcgaccgaccaccatcaccgtcaaggaggagtcgcagttcaagggcggcgagactgacttcgttgccaccaagctgatgacccgcctgacatacaccctggatgggatgaccggggagttcaagattgacggcagcggaagcatcagcctgaaggaggaggatggcatcgactcggcccccgtgacggtgcagcttcctggcggcgagcgtgtgcctttcctgttctctgccaaggagctgcaggccaagggcagcgctgacgggtttggcggcgagttcactgtgccgtcctaccgcggcgcaaccttcctggaccctaagggccgcggcgctgccatcggctacgacactgcagtgggactgcccgctgctgcgcattctgaggagc

SEQ ID NO: 2051 - DNA, 335 bp, Chlorella vulgaris
cggacgcgtggggaagaccggcactgtgaagcttgcagccaagcctgccgtgaagaaggccgctgccgcagtagccaagccagcagctaaagccgtcagcaagctgtccaatggcaccgtgaagagcgcggtggggagcgccgcgaagaaggccgagtcagcagtaaagaaggcaggaacagcggttcagaaggcagggccggtcgccaagaaggcgcaggcagccgtccagaaggcagggaccgtggtcaggaaagcaggcaccactgtgcagaaggcagggacccaggtgatcggcacccgccccaccaagaagattgagtcaattgcactgt

SEQ ID NO: 2052 - DNA, 362 bp, Chlorella vulgaris
acgcgtaagggaatgaacagcagccagtaggccaggttgattaacgactcctgcgggagtgacgtgaggctagggacggagtacaaaaaggctcgaagaagtggacctatgaacttttcatggagcattgaaagtgattgtggttgggtgtgaggattaagtgtgggacaacactctcgagggcgggtctctgtcgctgcatccctatcatatgcattgcactccattgtgcgaaatgacttggttcttaatgaatgtgatcctggtcgggtgcaatctaagaggttgttcctcccaggcaggtagttgagtttggacatcctcccttggtgtagagctcaggctgaatcgcctcatcgcgc

SEQ ID NO: 2053 - DNA, 354 bp, Chlorella vulgaris
cgaaggccgccctgaccgctacctccttcgctggggcccggctccaggccaggacttccaaggtccagccccgcagccgtgctgtggcctgcgtgcgggcagacgctaccaagtatgcagctgctgccatggccgccgtgatcgccctgactcccgctgctgccaacgctggcattgttgaggacctgcttgctaagtccgacgccaacaaggacctgcacaaccagcagcgcctggccagcagcaacgccaactttgcgcgctcgcgcaccgtcagcgaccgcacctgcaccttccccaacaacttcctgggctgcgacctgggcaagtacgcgggtgacgtcaagttcaatg

SEQ ID NO: 2054 - DNA, 284 bp, Chlorella vulgaris
  unsure (1)..(284): unsure at all n locations
gctggcgctcctgtanagcgccggtgtgcatgtctggcgaggtggggagggagganagggaacccatgccagcattggcgcatttgcagtcgctgcgggcggaccctctgtactcgggaactagctcctaacgggggtttacagggttggtgtgcggtggatattcttttggaggtggcctgccacggctgcgtgcagtgcggctgggttttgtacgtaacaacaagccacttctccctttcaggcccgctgtacgtgccaacctgattcccactgtagctagc

SEQ ID NO: 2055 - DNA, 363 bp, Chlorella vulgaris
gcgcaacgtgctttggcagcgtagttttggtctgttcctgttgtgcgcaagggctcttgggtctgtgtaatgggactggctgactagtcagctagtaacagctggcagacatagcggggctgtcgttgtttgctgcctgtcgccccaggctgcagcactgtttttcttcgcactagacctgtcctggctccctgttcagcgctgcctgagctatgtgggtataccttccttcgactgtacaaattccctcttgagcaggcagcagggtggctggtcctagccgccgctgcgtatatattgctgaactctgtttcagacacaaatgctaagaacttggtgtcctcctgtaactgatgctgaggg

SEQ ID NO: 2056 - DNA, 401 bp, Chlorella vulgaris
  unsure (1)..(401): unsure at all n locations
cacgcgtccggttcagctctcagcatgcctcagaccgttgttgcaagttaccgcaaacgagccatgacggccaaccagtacaccagtcggccactcttcgcaccttatagtttggatggggcgtcgccaagcgaggacctgctgtgggatctcacgagcaagctgacccctaaggagggctgcacaagactctgtgcccagctgagactgccccagacggaagaaaaattcaaagaggtggagcaccagttacagcgcaccctgcagagcttcaaggatgctggcacggnggcaaccaccgtgtacatagtgctgcaagtcccactgngcagcggtgagtacatgctggtcgacaaggtggcctgngaccttaacangcggcgcctctgaaccaatttgta

SEQ ID NO: 2057 - DNA, 490 bp, Chlorella vulgaris
cgtccgcaagatatatataacaaaatacttctttgcctgccatcttccccaaaagactgtcagctacgtgtgctgcaagttagaacaaggctgggcaccctgcatttgtgccagcctgcctacgttcaagctgtgacttgccgttgcgtttgactaccccggaatgacacaggaggtggcgctcaaggtcgccatggcgtgcgagggctgctcgggggctgtgcagagagtactgaacaagatggaaggggtgcagtcggtggacattgacatggcgcagcagaaagtggtggtgaaggggaatgtggaaccccagaaggtgttggaaactgtcgcgaaaaccggcaaggccacctctttttggcagtagcagcccagctatgcagcccaaagcagctgcgtgcaagcttgctgcgcgcggcatacagataggcgtggcgctgagtcttcagtatctgtcctttgtatgctgaggattcgtaactgttgg

SEQ ID NO: 2058 - DNA, 487 bp, Chlorella vulgaris
  unsure (1)..(487): unsure at all n locations
cacgcgtncctaacaagctagcttggtgggaccgctgctcctgctcggttcgcgtttccctacctggggccgctcagtcacgtttgaggtgagacttgtcaggtttctagtccacagcccacgcgagtttatgttactgtgtcgatggtatgtggccgtggtggcctcgtggcaagcattgtgatgtagcgagggtaggccccactgggtttcccggggccgtctggagggcagcctttacgaaggaaggtgaaacgcatggagcacttgggttcgatgaaactggtagcaaccgtgtatgggcctcaaggcagtggggcctgggttgtgccaaatggatgctgctgggtggcttatctgtttgctgctgctgtatgtgtgaaaggccatatgatactgcgcccccttgcgcgggctggctatatatgtgggctgagggccctgtgcattatgtagctgcccccttttaattccagatgatgtcaca

SEQ ID NO: 2059 - DNA, 342 bp, Chlorella vulgaris
cgcgtaagggaactcgccaccctgtaccccggtgatgcctttgacccccttggcctggctgacgaccccgacacctttgctgagctcaaggtcaaggagatcaagaacggccgcctggctatgttctccatgttcggcttcttcatccatgcacttgtgaccggcaagtctcccctggagaacctggccgaccatctggctgaccccgcctccaacaactgcttctccatcctgaccgccaccaagttcacccccggaattcagccctgaattttgagggaaatcccctggctgctgctagttcctcgttgttctatctcttggcttgttgccagtgtgtct

SEQ ID NO: 2060 - DNA, 343 bp, Chlorella vulgaris
cacgcgtaagctaaaggaagagatgctaggcaagctcaaggacctaggcaacaccatcttgggcaagttcggcatgtcccttgacaactttaaggctgagaaggaccccaccacaggatcgtacagcatcaagtttggtcagtgaaggcgttagcagcacgaacagtgttgtggtcttgaagatcctgcttttcaacaaaaaacacgctacactggctaggtttttttgtttgtattacaggtgccatgtttgcgtacctgttcacaaatcgcttttgcattgtggcgtggctttgtttgggaattggtgcgtgctgttcgtgccgctattggcaggtatgcc

SEQ ID NO: 2061 - DNA, 339 bp, Chlorella vulgaris
ccacgcgtacgcccacgcgtccgaagatgcagaccctctctgcccgtttcggcgtccgcgcccctgtctcccggggcacccgccaggtgacccgcgcctccgtggagtggtacggccccgaccgcgccaagttcctgggccccttcaccaaccccccttcctacctgaagggtgagttcgctggcgactacggctgggacacctctggcctgtccgccgatcccgagaccttctcccgctacagggaggttgaggtgatccatgcccggtgggccatgcttggcgcccttggctgcgtcgtgcccgagctgctggaccgcaacggcaccgtcaactttg

SEQ ID NO: 2062 - DNA, 520 bp, Chlorella vulgaris
  unsure (1)..(520): unsure at all n locations
cgtccggcacgcgtccgcacacgcgtacgctctctcggtagcccttagcaccttccgatcggtactatggctgccctgactgtgtctgccgccctggtgaaggcccccgtggccaccagcctacgcccggccaacaaggcccagcgggctgccttcgtgtccaatgccaccgtgcagaagaacaaggctatgatggtgtggactcctctgaacaacaagttcttcgagaccttctcctacctgccacccctgaccaacgatcagatcgcccgccaggtcgacttcgtcgtggccaacggctggaccgcctgccttgagttcgccgaccccgccaccgcctacgtgtccaacgagaacaccgtgcgcatgggccncgtcanctgcanctactacgacaaccgctactggaacatgttgaagctgccaagttccggtgcacgacccaagcaagttctaaagggatctacaatggaacgcgcccttcccaacccaaatttcccggggggcctttaacccaacc

SEQ ID NO: 2063 - DNA, 456 bp, Chlorella vulgaris
  unsure (1)..(456): unsure at all n locations
cacgcgtcgggtcccgtccttggcagatcgaggttgttatctgtgctgcaagggcctggcccagtcgtcncctgccatcttatatgctaggcctcgaccagcccaatcccccgcccttgcgcaaaatcccttctaggaaggctgtggacgtggccttcagcggccacaatatacagctttgggtgcgcaacaaggtcaggaggcttctgaggcgccagaagcggctcctgcaatagtatgcgccaaacccagaatactgtagtcagaggcaggcgagctatcttagtgccctatagacggcaccatgtcnccaagtaccatgagtggatgcaagacccagacctgcaggaggcaacagcatcagagcccttgacgttgcatgaagagtatgacatgcaagagagctgggtgaatgacgagaagacatgtaccatcattgtgttggaccctgaatac

SEQ ID NO: 2064 - DNA, 349 bp, Chlorella vulgaris
cgcgtaagggaactcgacaccctgtaccccggtgatgcctttgacccccttggcctggctgacgaccccgacacctttgctgagctcaaggtcaaggagatcaagaacggccgcctggctatgttctccatgttcggcttcttcatccaggcacttgtgaccggcaagtctcccctggagaacctggccgaccacctggctgaccccgcctccaacaacggcttctccatcctgaccgccaccaagttcaccccctgaattcagccctgaattttgagggaaatcccctggctgctgctagttcctcgttgttctagctcttggttggttgccggtgtgtcgccgttgt

SEQ ID NO: 2065 - DNA, 52 bp, Chlorella vulgaris
ctaacgcctatacgaggattcctcgaagacagaagacatcaacatgtctgac

SEQ ID NO: 2066 - DNA, 434 bp, Chlorella vulgaris
  unsure (1)..(434): unsure at all n locations
cgccagaacacanaatgaagctggtcgctgcttacctgctggctactctgggtggcaaggatgcnccnancgccgaggacatcaagtcnatcctgtcnagcgttggtgctgaggccgatgangagcgcctgagcaagctgctttctgagctggagggcatgaacatcaacgacgtggttgcctccggcctgtccaagctggcctctgtgcctgctggcggagttgcctcttcgggcggtgctgcncccgctgctggcggcgctggcgctgctgaagctgctgcccccaaggaagaggagaaggttacggaagacgaggaggaggacatgggcttctccctattcgactaagcgcacggcggaccgcacagcggacaggggtctgtgatgcctctgaatcaacccgtgtaaaaacctccctttcagaatacacag

SEQ ID NO: 2067 - DNA, 524 bp, Chlorella vulgaris
  unsure (1)..(524): unsure at all n locations
cacgcgtcnggacccgcgtccgcacacgcgtacgcccacgcgtccggaaggctgccaaggcagctactcaacaaacaggagcggctcagccggtgaacgtgcgagaggagcggctttggactgccaagacaggtcaactgattaagagccgcttcacccaccaaacccaagaggtgtcaaagggacattttgggcaaccccagaaagggtcgagctangcggcacagggcttttcgccctggtgccctggtgcctgctgtcacccgcaccgcacggaacatctgatgtgctgtttgttgttggctgcgagagtgcacggtgcgtatttattactctccgcacgcggaaggcaaaacagtgcgcttgctggctggccagctgtgctgtangcactgtgccanaagtgctgcgctggctccaaattgcggtttgtagtgggagcatactagcaagtgggcaccttggtgtcatgtatagcactccgtcctgttgcataagctttttggaagagagcgcctgctgct

SEQ ID NO: 2068 - DNA, 450 bp, Chlorella vulgaris
  unsure (1)..(450): unsure at all n locations
cacgcgtccggtgcaatctcncgtcgacaacaggtccaaggttcacaagatgcagaccctctctgcccgtttcggcgtccgcgcccctgtctcccggggcacccgccaggtgacccgcgcctccgtggagtggtacggccccgaccgcgccaagttcctgggccccttcaccaaccccccttcctacctgaagggtgagttcgctggcgactacggctgggacacctctggcctgtccgccgatcccgagaccttctcccgctacagggaggttgaggtgatccatgcccggtgggccatgcttggcgcccttggctgcgtcgtgcccgagctgctggaccgcaacggcaccgtcaactttggcgagaacgccgtgtggttcaaggccggtgccgccatcttcggcgatgacgggctgaactanctgggcaacccctcctcatcacgcac

SEQ ID NO: 2069 - DNA, 441 bp, Chlorella vulgaris
acgcgtccggtgcgagctcgaatcacatctgacgaacatttgatagaagtgggtccttaacaagcgagtcatgcaactgtcagggctgcagcaattgtctacggcagctgcaccagtcggcttaggcaagattcgcaacggttcgcaggttcaagcactctttccaatttccagcggggcaacccagcaaccatatatcagcaccgccagccaaccacggttgatctccaacaggcgacagctgctgttgttcactgggctaacagcggcgggcgtacctacttgcaactccgctatagctgttgaggctgaaggtactggtgcagaggtctgtacggtgtgcggtggcacgggccatattccctgcgccttgtgtgggggcactgaacgctggcaggatgtgaatctgctcagcggaggttttctccagttggctgcctg

SEQ ID NO: 2070 - DNA, 359 bp, Chlorella vulgaris
cggctcggcccacgcgtcagcggatctacgccaggtgttccggctcgcagtgcctaacaccttgaggggtggtcaccaacagctgatccaggggcagaaccagtccagaacgcctgcaaacgtagtgagagcgatgtcatctgaggaagtggcggctcacaaggcggctgagactggggccaaggacagcggtgcaccgaccattttcgataagatcatcaacaaggagatccccgcgactgtcatctatgaagatgaggaggcgctggcattcagagatgtgaacccccaggggccggtccactttcttgtcatccccaagcaccgaaatggactcacaatgctttctaaggccgggg

SEQ ID NO: 2071 - DNA, 379 bp, Chlorella vulgaris
ccacgcgtacggttaaagttgcctgccggttctcgacccggtctggtcctgctggtgaacagtgcacaatgccgtctgccaccaagctcgtcaagaaggaggcgtacgacgccaagctgtgcgagctgctggacacccacaccaaggtgttcctagtccatgccgacaatgtgggctccaagcagttcatggatatccgtgcggccatccgcggacactccaagattttgatgggcaagaacacgctgctgcgccgctgcatccgcctatactgcgagcgcaccggcaacgaccactggctgggcctgctggactacctggtcggcaatgtcggcctggtcttcacccagggcgacctcaatgaggtgcgcacgccaat

SEQ ID NO: 2072 - DNA, 370 bp, Chlorella vulgaris
caaaccttcgatgcctaccgcgaggttgaggtcatccatgcccgctgggccatgcttggcgccctgggctgcctgacccccgagctgctgcagaacgccggcgtggccagcttcggcgacgctgctgtgtggttcaaggctggtgcctccatcttcggcgatgatggcctgaactacctgggcaacccctcccttggtccatgccagtccatcgtggccaccctggccgtgcaggtcatcctcatggctcaggctgaggctttccgtgtgagcggcactgccccctggagcggcgaagagctcgacaccctgtaccccggtgatgcctttgacccccttggcctggctgacgaccccgacacctttgctg

SEQ ID NO: 2073 - DNA, 376 bp, Chlorella vulgaris
ggctcggcccacgcgtcagcccacgcgtccgggtggaaggggtgcttgcaaattgagattgcaactcaaagcacagggattcaccgtcccgttggttgggatgcctgctgtgccgcggcacggggcagtttgaaaagtgcgccctttggtgcgcctctctgatgttactgctgacgggggcagttccttgctggtcacctgctttcgcatagaggttagtgcctgctatactgttttccccgctggtcggctagtagggttgtgcccacgctgctaaaagtagtacacagcctacttagggggcaccgtgtaggaaataagcctagtggtaggtgtgatgaaacagcaccctgcttggctccaaaagctcttgttc

SEQ ID NO: 2074 - DNA, 380 bp, Chlorella vulgaris
ggctcgacccacgcgtacgcccacgcgtccgcggacgcgtgggcccaggcccactcccccaggcagaaacaagatggtggctctccagattctcgcagcgactgccaagggcaccgtcaagggtaccgttaagggtaccgcaaagcaggcagcgaagaccgtgaagaaggcggccatcaagaccgcaaagaaggtcgcccccaagaagggtggcgtggagtggtacggccccaacaggcccctgttcctgggcccctacagccccgagcccccgagccacctgaagggtgagttcgctggcgactacggctgggacacctccggcctgtccgccgatcccgagaccttctcccgctacagggagattgaggtgatccatg

SEQ ID NO: 2075 - DNA, 432 bp, Chlorella vulgaris
cgtccgcacacgcgtacgcagtcggccaacatggttagccgtctgagcaagaaccgcaagaagcgcggtcatgtcagcgccggccatgggcgtatcggcaagcacaggaagcaccccggtggccgcggtaacgccggtggccagcaccatcacaggattatgatggacaagtaccaccctgggtactttggcaaggtgggcatgcgctacttcaacctgaagaagaacaagttccactgccccatcgtcaaccttgacaagctgtggagccttgtgggcgaggaggctcgtgttgaggcctccaaggactcgagcagcgctgccgtgattgatgtcagcaagtatggcatcttcaaggtgctgggcaacggcgagctcccgcagcagccagtggtggtgaacgccaagtttgtgagcaagctggcggagcag

SEQ ID NO: 2076 - DNA, 346 bp, Chlorella vulgaris
acgcgtcagcccacgcgtccgcccacgcgtccgcggacgcgtgggcggacgcgtggggacaacaggtccaaggttcacaagatgcagaccctctctgcccgtttcggcgtccgcgcccctgtctcccggggcacccgccaggtgacccgcgcctccgtggagtggtacggccccgaccgcgccaagttcctgggccccttcaccaaccccccttcctacctgaagggtgagttcgctggcgactacggctgggacacctctggcctgtccgccgatcccgagaccttctcccgctacagggaggttgaggtgatccatgcccggtgggccatgcttggcgcccttg

SEQ ID NO: 2077 - DNA, 299 bp, Chlorella vulgaris
  unsure (1)..(299): unsure at all n locations
cgcgatggacgcgtcactactccctaaacaccaggcgcgtgcagcctcggcaatgccttttggtggtcggagaacagcggtgcaggcccgcagccttggctttagctcctcttcctttgcggcgcccaagcctgcactctggcagagctccgctgccagcaagcagacgaacggcaggcagcagttagcagtctacgcctggcaacatgccacaacagggccttttgcancgatcgtcgttgttgtgcggaatgtgatgggggtgaagcccttttaacagctaagaaggaaaggcatct

SEQ ID NO: 2078 - DNA, 350 bp, Chlorella vulgaris
ggctcggcccacgcgtcagcccacgcgtccgcccacgcgtccgcccacgcgtccgcccacgcgtccgcctatggtggccgggccggctacttgagggcaccctgggggacagcgcaagtgtgcaggtagaggtgtttggctgcgacctggccatgtctctctactcttccaagatcagcagcttcgctgaaggtaaagatggccgcctggctaagctgcaggctgccagcaacatgggcagaaaggcagtggagagagctctgaaggaggaggccggctgagtagcaagtggcatgcacaagaagaccgaacatgtcgtgccaaccttctgaccttcacggtgctactgg

SEQ ID NO: 2079 - DNA, 305 bp, Chlorella vulgaris
cggacgcgtgggcggacgcgtgggcggacgcgtgggcggacgcgtgggcggacgcgtgggcttcaccatggtgaagtacgctaaggaggtggacaacgccaccaaggccgccaaggcccgggggtctgacctccgcgtgcacttcaagaacacgcgcgagtccgccgcagccatccgcggcaagagcctggtgaacgccaaggcgtacctggaggctgtcattgatcacaagcgctgcatcccgttcctgcgctacaatggtggcgtgggccgcaccagccaggctaagaatgagggcaacaaga

SEQ ID NO: 2080 - DNA, 404 bp, Chlorella vulgaris
ggctcggcccacgcgtacgggcaagccgggaatcgagttggccttgagccgacgcgtttgacgcccgcagcagcacctaacacacgcaccaggcaccatgctcatctccaagaagaacaggcgtgaggtgtacaagttcctcttcaaggagggtgtgctgtacgcggagaaggacttcaacctgccggagcaccccgagattgagggggtgtccaacctggaggtcatcaagctgatgcagtccatgaagagcaaggacttggtcagcgagcgctatgcctggcgccactactactggttcctgacggacgcgggcatcgagcacctgcgtgagtacctgaacttgcccagcgagattgtgcccgccacactgaagaaatcgaccaagcctccggaaccggaag

SEQ ID NO: 2081 - DNA, 461 bp, Chlorella vulgaris
cgcgatggacgcgtaactactccctaccaaccaagcgcgtgcagcctcggcaatgccttttggtggtcggagaaaacggtgcaggcccgcagccttggctttagctcctcttcctttgcggcgcctaagcctgcactctggcagagctctgctgccagcaagcagacgaccggcaggcagcagttagcagtctacgctggcagacatgccacaacagggccttttgcaccgatcgtcgttgttgtgcggaatgtgatgggggtgaagccctttaaccagctaagacggaaggccatctccctacactcgcaagtcatcaaggacttctgtaaacagctgggggctgactgcaagcacgtgcacgggctgattccgttggcgaacaacaacggcaaaaacttggctttctggcatacagccactgacatactacgggaccgctggtatcactaccttgtcag

SEQ ID NO: 2082 - DNA, 292 bp, Chlorella vulgaris
atgcacctggacctgcagaaatcgctgacctttgcgcacagcaagctgtgcaagccggctacatagagtctgccttgtcctgctaggtctgctgcataccatgctgctgcgttcattaaggacccaacagacagcctcgtcgccagcgccactgtcacgaggcgtccacacagaatggcacctcagccaagtcataaccgacagtggtggttaagattgataactagagctatccctttgccaccgtcgtcactgtgaagtttaggtactatctgcgtgagctggtagacac

SEQ ID NO: 2083 - DNA, 435 bp, Chlorella vulgaris
  unsure (1)..(435): unsure at all n locations
cacgcgtccggcacgcgtccgaagggagcaacctgccttctggtcncagcatcaagcagcaggctagtcaggacccgaagtgcccttcacaggcaccatgcaccaaggctagagcagcggactatctgggtggaaaaccggctcaccatgtccacgaaggtagcctcnctgccctggatggccgccttggcgcctgcggggacatcagcgtacatggcagcatcnctgagctgtcatttcacactggcaaccaatgctgggccgcatcgtctgcgcatggggagctgtcggtggcatctgttcatgtcattgacgcttctangaaaacaatgtccggggggcacagcctgttaagaagagaaccaagcaccgtgtgctggggacacccttcatacacccatctaaatcggaaatgtatgttacaaggaagggttc

SEQ ID NO: 2084 - DNA, 519 bp, Chlorella vulgaris
  unsure (1)..(519): unsure at all n locations
cacgcgtccggngcgcgtgggcagaccgtaggcggaccgtgggctgtaacgaaagatcaaaggcagacacaccatgcaggtgcaagccctcttcaagaagcttggcggcggtgcccccgctaaggcagccaagaaggccgccggtgcagccaagaaggccgttggcaacgccaagaaggtcgcctctggcaccaccaaaggtggctggctgggcactgacagcaacaacatcgacctggacaggtggtacggccctgaccgcgccctgtacctgcccggtggcctgctggaccgctctgaggtgcccagctacctgaacggcagcctgcccggcgactatggctacgacccccttggtctgggcaaggatggctgcctggagaagtancgcgccaacgagctgctgcacgcccgctgggccatgcttgccgctgctggcgccatcatccctgaaggccttgccgccaatggtgccgatatcaacggcgcccactggtacgagaccggcgctgccatgct

SEQ ID NO: 2085 - DNA, 514 bp, Chlorella vulgaris
  unsure (1)..(514): unsure at all n locations
acgcgtccgcgcacgcgtccgcacacgcgtacgccggcccttacatcaagatgggtcgtgtcatccgcgcccagcgtaagggtcgtgggtcggtgttcaagtcncacaacacccacaggaagggcgcagccaagctgcgcgtcctggacgccgcagagcgcaatggctacatcaagggcgtgattagcgacatcatccacgaccccggccgtggcgcacccctggccaaggtgactttccgccacacccacaagtacaagcacgacaaggagctgttcatcgcccccgagggtgtgttctctggccagtacatctactgcggcaagaaagcccacctgacattggcaatgtgaagcccgtgggcgacatgcccgagggtaccatcgtgtgcaacgtggaggagaaggctggcgaacgcggctcactggcccgctgctctggcgactacgccatcattgtggcgcacaaccctgatgccggcatcacccgcattaagctgccctcgggcgccaag

SEQ ID NO: 2086 - DNA, 608 bp, Chlorella vulgaris
  unsure (1)..(608): unsure at all n locations
cacgcgtccggggacgagcaccttacaatggcaccttcagggaagaaggatactaaggccgccaaggcggcaaaggccgtcaagaagttcaatggaagaagactcgcaagccccgctacagcgtggtcttccacaggcccaggacactcatccgctccagggaccccaagtaccctaggcagagcgctccctccctgcccaagatggacgccttcagcgtgatcaaggcccccttgaccaccgagtcggccatgaagaagattgaggacaacaacaccctggtgttcctggtggacgtgcgcgccaacaagaagcagatcaaggacgccgtggcccgcttgtatgacatccagacgcgcanaatcaacaccctcatcaggcccgatggccagaagaaggcctacgtgcggctgacccctgactatgatgcgctcgatgttgncaacaagattggcatcatctaagcagcagtgtgccgcggcagcagcagcagcgtatctttgtcttgggcggcagcagcggtggcacgggcgctgaaaggggtgggagcctaagcgctggccttgccggcagccccgggccacatacagtggcagcagcatgtaaca

SEQ ID NO: 2087 - DNA, 361 bp, Chlorella vulgaris
ccacgcgtccgcggacgcgtgggggcccagcagcgtggctacactgtggaggagacgcctgtcaccattgacgaggccatggaggcggacgagctctttaccactggcactgccgtggtcgtctgcgctgttggcagcctaacatatcgtggcgagcgcaagcagtttggcaccctgggcgagccagggaaggtggcgttggagctgtacgaggcgctgactggcctgcagcaggagaaggccgacgaccccttcggctgggtcgtccccgtgctctgaagcagccaagcagcatgcatgcagcatgtagttggtccccttcgggtgacctgcctgggccgctcgtggctccttgctgatg

SEQ ID NO: 2088 - DNA, 371 bp, Chlorella vulgaris
cggctcggcccacgcgtacgcccacgcgtccggtccttgctgtcattctctttcctgctaggtccccaatcctcgtgctgcagcggtcatgttgggcgctgcaaccgccgctaccctccaccaaagcagcctccttgctcatagatgccgtgtccggcttcaaagccggcggtgcagcggcaaggtgtttgcgccaaaagcctccagcgacagcaacagggagggcagcagcgttgactgggaccaggcatggagcaacttttctcagaatgccggggccaagattccagaggttgagagcagggtgtatacgcaggcaccgaggttcgcggagcgcaggacctggaacgtgggccagcagcaggagagca

SEQ ID NO: 2089 - DNA, 364 bp, Chlorella vulgaris
ccggctcgaccacgcgtacgcggacgcgtgggaaaaaaaaaaaaaaaaaaaaaaaaaaaaaaaaaaaaaaaaaaaaaaaaaaaaaaaagggaggacgcccaaaaaagggcagcctctcaatagggttgcaccctacgtgatcccaccttaaacttctcacctcttctaaattgacagcccaatttcatttcactggccttcatttaaaaaccttgcgtttgcaaaaatcctgccgttaacaaccttaccccctttcaacaaaatccccttttcccaaaaggcctttacacataagaggtccaaaccattcgccctcccaaatatttacttacccaaaatttgtaatgggaaattccccattgcg

SEQ ID NO: 2090 - DNA, 352 bp, Chlorella vulgaris
  unsure (1)..(352): unsure at all n locations
gcgacaggaacccaacgagatgcgccccgagaagctccctcccagtccatgncgacccagcagtccagaccttggcgccccacgccgatgangaggaggcaccccttgccaagccagcaggcagagcgactgtcgtggtgacgacagcccctcgtccaatctttccacctgggtctcagctcctgctgcggctggtactgtcactgctggcagcggccttgctgcatactgtgctgggccgtgacacacgctgcagctccctgctcatcacctccctggccctgtttgtgctcactgagcacctctaccggacctcgacgcccccacagccgggccctgttagacattaaac

SEQ ID NO: 2091 - DNA, 453 bp, Chlorella vulgaris
  unsure (1)..(453): unsure at all n locations
aaccatgaagctaaatattgcatacccggccaccggctgccagaagaagctggaggtggacgatgatgggaagctgcgtgccttctttgacaagcgcctttcccaggaggttgagggcgaggccttgggcgaggagttcaggggctacgtgttcaagatcaagggcggccaggacaagcagggcttccccatgaagcaaggtgtgctgacctcgggccgcgtgcgcgtgctgatgagccccggcgaacagtgcttccgcggctacggccgccgcaacggcgagcgccgccgcaagtcggtgcgcggctgcatcgtgtcccccgacctctccgtgctcaacctggtcatcgtcaagaagggcgagcaagagctgccggggctgaccgatgangagaagccaagatgcgcggccccaagcgcgccgcccgcatccgcaagatgttcacacctcac

SEQ ID NO: 2092 - DNA, 623 bp, Chlorella vulgaris
  unsure (1)..(623): unsure at all n locations
cacgcgtccggaaccccttcctacctgaagagtgagttcgctggcgactacggctgggacacctctggcctgtccgccgatcccgagaccttctcgcgctacagggaggttgaggtgatccatgcccggtgggccatgcttggcgcccttggctgcgtcgtgcccgagctgctggaccgcaacggcaccgtcaactttggcgagaacgccgtgtggttcaaggccggtgccgccatcttcggcgatgacgggctgaactacctgggcaaaccctccctcatcaaggcacattcaatcttggccttgcggccctcccaaattgtgctcatgggcctgtttgagggctaccgcgtgaacggcggccccgctggcaagggcttgacgcccctgtacccggcgagggcctttgacccctgngcctggccgacgaccccgacagcttcgctgagctcaaggtcaaggagatcaagaacggccgcctggccatggtgtccatgcttggctttggcgtgcaaggcctgctcaccggcaagggccccctgnagaacctggctgaccacctgnctgacccaccgtgaacaacggctttgccgtggccacaagttcaccccggcaactgagct

SEQ ID NO: 2093 - DNA, 533 bp, Chlorella vulgaris
  unsure (1)..(533): unsure at all n locations
gcgtgggcagacgcgtaggcaaacatttacttaaagatgtcggccgccgctcagaccgtgcctgaggctgtcttgaagaagaggcggagggatgaggagtgggcagcaaagaaggctgctgacgctgctgaggccagcaagaaggccaaggctacccgcaaggagatcttcaagcgggcggagcagtatgtgaagcagtaccgtgcacaggaggcggacctgatccgactcaagcggtctgccaagtccaagggcggcttttatgtggagccggaggccaagctgttgtttgtggtgcgcatccgcggtatgaacgacgtggcgcccaagaccaagaagatcctgcagctgctgcgcctgcgccagatcacaacggagtcttctcaaggtgagcanggccacatcaacatgctgcagcgcgtggagccttatgtggcgttacggctacctaacctcaagacagtgagggagctgatctaaagcgcggctttgcaaagtgaacaagtcgcgcgtgcgctgaccgacaatgccat

SEQ ID NO: 2094 - DNA, 379 bp, Chlorella vulgaris
ggctcgacccacgcgtacgcccacgcgtccggtttagttaggtgcagcaaccatggggcgccgcccagcaaggtgctaccggcaaatcaaggggaagccgtaccccaagtctcgcttctgccgtggtgtgcctgactccaaaatccgcatctacgacgtgggcgcaaagaagtctggcgtcgatgccttcccttactgcgtccacatggtcagctgggagaaggagcacatctcctctgaggctcttgaggcggcccgcattgctgccaacaagtacatggtgaagaatgcgggcaaggacgcgttccacctccgcgtgcgcgtgcaccccttccacgtgctgcgcatcaacaagatgctttcgtgcgccggggctgat

SEQ ID NO: 2095 - DNA, 221 bp, Chlorella vulgaris
  unsure (1)..(221): unsure at all n locations
tgtatctggcatgatgaatggccgggtatcgttcactatgttcactgggtgctggtctggctgcacaggaaatacacccagttcgacctagtctccgctgggtgactgtntgttgcaaatactgtgctgctatgggtcctgttgggcaattgctancacggtgataaattcggttgatgtgggcaaaattcggctcacttgtcaggtaaatattgccggtt

SEQ ID NO: 2096 - DNA, 210 bp, Chlorella vulgaris
tcatggtatactagtatgcatggtatgccatagaaactgcagtactttctttgcccctgacatcaatggcgctctgatgtcttctgggcttgaaactgttgatatggacgtgattttgcggctcattggtattcttgggcatggattgaaatggtcccggggtactctgttcgacctcatgtttcactggtgtgcttgggtcttggctgc

SEQ ID NO: 2097 - DNA, 347 bp, Chlorella vulgaris
acgcgtccggaacatggggctcaattccaaaatcaagaaggtcaagcgccgtgagcgcgagatgaggctgctgcttgtgggcttggacaatgccggaaagacaaccgttatgaagcagatcagtggggaggatatcagtactgttagccccacgcttggcttcaacatcaaaacgttggagtttggtccgtacatattaaatatctgggacgtgggtggccaaaagtcgctgcggtcctactggcgcaactattttgaacagaccgacggcctggtctgggtggtagacagtgccgatatacggcggctgcaagattgtgcagaggagctgcaaaaactgctgcttg

SEQ ID NO: 2098 - DNA, 262 bp, Chlorella vulgaris
tgctgagctcaaagtcaaggagatcaagaacgggcgcctggctatgttctccatgttcggcttcttcatccaagcacttgtgaccggcaggtctcccctggagaacctggccgaccatctggctgatcccgcctgcaacaacggcttctcgatcctgaccggcatcaagttcatcccctgaattcagccctgaattttgagggaaatcacctgtctgctgctacttcctcgttgttctagctcatggctggttgccggtgtg

SEQ ID NO: 2099 - DNA, 332 bp, Chlorella vulgaris
agaaaaaaacaaccatggcgccaaatgagcagaattccaaggaggccaatgccatggctgcggacaatgccaccaatggcaacaagaagaagtggtcaaagggcaagatcaaggaaaaggtcaacaatatggtcaagttcgacaaggccacatatgagaagctgttgacagaggtgcccaagtacaagatgatcactccctctgtgctctctgacaagctcaggatcaacggcagccttgcccgtgccgccatcaaggagctccttggccatggtctcatcaaggttgtggccaaaagcgcaagccaccagatctacactcgagccaccgct

SEQ ID NO: 2100 - DNA, 233 bp, Chlorella vulgaris
gtggtctccgcggtctgtttatgtatgccctcggtgtggcgctcatgggtattatgtcgctgtgcagtggtggtaacctttctgtcagtaatattggggtgtgtacatttctgttaggttgctgttcgtctacgcacttccttgttcgggagtatgtgtcctggcttggttgctggctggtgctcatacgttatgtgctgggatgctattttcctgtgattctggatgttttt

SEQ ID NO: 2101 - DNA, 366 bp, Chlorella vulgaris
gacccaagcgtacgcccacgcgtccgcccacgcgtccgcttggctcttcgttcatcgggtgggccggtcaaaaatggcggatcacgaccacgagcacgatgttcacttcgagtctgccgatgccggcgcctcaaagacctatccccagcaggctggtaccatccgcaagaacgcatacatcgtgattaacaaccgtccctgcaaggttgctgacgtgtccacctccaagaccggcaagcacggccacgccaagtgccactttgtgggcattgacatcttcaccggcaagaagtacgaggacctgaccccctcctcccacaactgcgacgtgccccacgtgaaccgcaccgagtacacgctgctgga

SEQ ID NO: 2102 - DNA, 398 bp, Chlorella vulgaris
  unsure (1)..(398): unsure at all n locations
acgcgtcagctgtgaccgatgtcaaggctgccatcgaggccagccagggcatcncctgcgatgcgcagcgtgtgatgttctctggtcgccagctggaggaggaggcctcnctggccgcctgcggcgtgtctgacgacagccagctgtacatcctgatgcgcctgctgggtggtgccaagaagcgcaagaagaagacctacaccaagcccaagaagcagaagcacaagcacaagaagatcaagctcagggtgctcaagttctacaaggtagacgacagcggcaaggtgcagcgcctgcgcaaggtttgcccccagtgcggccccggcatcttcatggcgacgcacttcacgcgcgtgtactgcggcaagtgcgacctcacctacgtctatgacaaggag

SEQ ID NO: 2103 - DNA, 152 bp, Chlorella vulgaris
  unsure (1)..(152): unsure at all n locations
gggttatctacaatagccgaggcctangggcgaagggtgcttcttcactcagacacggctcctgccgatcgtctgangaaccgtgcatcatgacttcgaagttccctgcacacgcaatcacaagggagcccgcgcggacgactatagtgaac

SEQ ID NO: 2104 - DNA, 108 bp, Chlorella vulgaris
cgtccgcatacgcgtacgcccacgcgtccgcccacgcgtctggcatgaactagtgacgtgtcggtgggcatccgtggtaaaagccttggtgggaaaggcatgccggag

SEQ ID NO: 2105 - DNA, 401 bp, Chlorella vulgaris
cctgtacagacagaccaatgacaaagaagaggaggaactcgggtcgcaacaagcacggccgtggccatgtgacccgcgtgcgctgcgaatcctctggcgtgctggtccctaaggacaaggccatcaagcgcttcattgtcaggaacatcgtggatgcctccgccatccgtgatatccaggacgcttgtgctattgatgggtatgcgctgcccaagctgtaccgcaaggtgtattactgcatcagcgcggctatccactccaagattgtgcgcgtgcgcagccgcaagaacaggcgcaacagggagccgcctgcacgccctggtttcgggccccgccgtgagggccagcagggcgggcagcaaggccagcagggggggggggcagcagggaggacagcagca

SEQ ID NO: 2106 - DNA, 397 bp, Chlorella vulgaris
ctggaacaggcgcgcgcggcgaagaaggcttccaagaagatcggcaaggccttctacaatcacatgatcaccgacagcgactacgtgggtgaggactacgaggtcttcgccacctggctgggcaccacccagtacgcggcagctgctggcagctgagcctaggtctttgccgctgccgtcagcttgcagcggggctgctggcgacggcggcagcaggaggaacagagtgatgttgggaggctccctggccgccttaatcagctgcacaccggtccctatttgctggggttgctgtggccgagcagggagcgccgtgcggacgcagattcggggtgctgtctttgcctgccgcgtggcatctcgtgtcgcagcagtggcagtagcggttgtggtctgg

SEQ ID NO: 2107 - DNA, 303 bp, Chlorella vulgaris
gacccaagcgtacggacccccatccccaccgactcgacccgccgcaagggtggtcgccgcggtcgccgtctgtaggcgcgcggtgtggcgctcatgggcagcatgccgccgtgcagtgctggcaacctttctggcagggaaatttggatgtgtgcatctctgttatgttgctggcgtggcctgcttccttgctcgggagtatgtgtcctggcttggctgctggctggtgctcacaggtcaggtgctgcgctgctactttcctgacagtctggatgtgttgtaactgctcgcatcagcattcaa

SEQ ID NO: 2108 - DNA, 394 bp, Chlorella vulgaris
  unsure (1)..(394): unsure at all n locations
tgcacaaccctgggactggaccagccctcagcctgccgcaacggnggcgatgcggcgccgcctggcacagctgcgactgcaacggcgaccatggcaaggccagccgagggtctgtgggcacggccaccaaggcagccttgaaggatacttcagccccaggagtgctactgccgcgtcgcaatgcaatagcaagtgggaggcctgtctgctgcatggctggtggcggcggccaggcagccctctgggtggctgtgctacagaggctttcaccttgtatgtgtaccgcttagatgatttgtttggcgacggctgctcctcgtggaggcttcatggggaggaacttgaacgaacgatactcaccgagttttgtgtgtacatgggtttttgggtgctg

SEQ ID NO: 2109 - DNA, 398 bp, Chlorella vulgaris
cggctcgacccaagcgtacgcgccctgggctgcctgacccccgagctgctgcagaacgccggcgtggccagcttcggcgacgctgctgtgtggttcaaggctggtgcctccatcttcggcgatgatggcctgaactacctgggcaacccctccctggtccatgcccagtccatcgtggccaccctggccgtgcaggtcatcctcatggctcaggctgaggctttccgtgtgagcggcactgccccctggagcggcgaggagctcgacaccctgtaccccggtgatgcctttgacccccttggcctggctgacgaccccgacacctttgctgagctcaaggtcaaggagatcaagaacggccgcctggctatgttctccatgttccggttcctcaacca

SEQ ID NO: 2110 - DNA, 417 bp, Chlorella vulgaris
  unsure (1)..(417): unsure at all n locations
acgctcaggtgcaatcccttgagcagctggttcncatacacaagctcctcaggggcccacgagcggcgacagcccttcaagccctggccaacctgctgccggatcgtgggccaggccacctgcatgcctcggtgctgccgagtcaacaggacacagtcaacagcgggctgctgtcgtggctgcctggcgagttcgtaccgctgcctttcgggcagctgggcaaggcangcgaagagactgctgtctggctgttgccgccacctgaggacggccgagcccagggcaccgatggcagcggcaaccatgccgaagtggacgcggggatcctcctcctggcctgcagcgagcaccaccacctgtgctatgctggcatcgtggccggcagtgaggcagccctggcagaagcgctggtaaagg

SEQ ID NO: 2111 - DNA, 382 bp, Chlorella vulgaris
gagcaaggtgtccggcgaggtgctgcgtgagggtatcgctggggtgctggagggctccaagtccaaggcccgcaagttcacggagaccgtggagctccagattggcctgaagaattatgacgcccagaatgacaagcgtttcagcggctctgtgaagctgccttactgcccccgtccccacctgaacgtgtgcgtgctgggtgaccacaagcactgcgaggaagcccagaacgcgggcattgacgcgatgagcgtggatgacctcaagaagctgaacaagaacaagaagctggtcaagaagctggccaagcagtatgccgccttcctgtcctctgacagcgtgattaagcagattccgcgtctgctgggccccggcctgaac

SEQ ID NO: 2112 - DNA, 317 bp, Chlorella vulgaris
tctgcgcccaggctaagaccggcacttgtggcctgacatacgtggcacgggtgatacgggagtccaccatgagcaccactcctcagagagggagtaccaccgctccatgagggccccgcatgggcatgggtccctggcgggcaaggtagacccccataacaggcgtgcgggtatgataccgtgctgccgctatgcaccttgtgtggcactggttggcggcttggttcgctacggatcctgctggcactgatcgtgtctctttgtcacagattttgatttggtgggtctactgccctggcagggtgggcatacttgca

SEQ ID NO: 2113 - DNA, 301 bp, Chlorella vulgaris
gcctcttcatcacaaaaaagtacgcctacgcacagatatggcggctagctgacaaccgggtcgtagcagcagcctccacggtagagaaggcgctgcaggaaggcttgggctccaaggctgacaagattgcagcagtcagggtgggccaagcggtagctcagcgggcgcagcaggccggcgtggatgccgtccactggccgcggaagcggggccagcggtaccacggcaatattgcagccatgatagacgccctcagggggcaaggtgtcaagctcatatagcgggggccctctaaggagga

SEQ ID NO: 2114 - DNA, 106 bp, Chlorella vulgaris
  unsure (1)..(106): unsure at all n locations
gtcnggatggagagatgtgcagcggcgcggctgataccattgctttatgccagagtggcgtggggcctgctggccagtagcagccgtgtaagcaagacacgcaggc

SEQ ID NO: 2115 - DNA, 414 bp, Chlorella vulgaris
agccaacagaatgcagaccaccttcgtgggcaccacccaggcgctgcgcgccaaggtctccacccaggccactcgtggctccaaggtagcaacctccatgcgccgcaccgtcaagtccaagaacgtgaagaccaccgacaccagccagtggtacggtcccgaccgccccaagttcctgggccccttctccgagggtgctgtgccttcctacctgaacggcgagttcgctggtgactacggctgggacaccgccggcctgtccgccgaccccgagaacttcaagcgctaccgccagattgaggtcatccatgcccgctgggccatgcttggcgccctgggctgcatcttgcccgaggtcctgcagaggtacagcggcatcgagttcggcgaggctgtgtggttcaaggctggcgc

SEQ ID NO: 2116 - DNA, 421 bp, Chlorella vulgaris
  unsure (1)..(421): unsure at all n locations
acgcgtcnggggtcgagatagcactatacagagaagttctctacgcgcgtcagcacctccatgaggtcgtgcagcagggcatacttcacggcacacttcagcgtccgcacgtcgcttatgagggctcttatcaccggtgagctgtgcagcaagcagggcgtgcgctctgtgctgatctgcatagacgacgacgtgaccgtcgtcgtcagtatctacaacggtcgtgagggcaacgttgtgcacgtgtatctcaagatgtgggtcatccattttgtgcggctcatacacgagatggttaacggcacagtcgtgaatgtaggtgtcaatgtctctatggttgtgatcaccgttctgatgatggacattgacatgaagaatgtccttgagcggctcattggccgcaaggccgacggcaagggca

SEQ ID NO: 2117 - DNA, 243 bp, Chlorella vulgaris
agaacctgcagtaccacgagatctccgccaagtccaactacaactacgagaagcccttcctgtacctggcacgcaagcttgtcggcgaccccaacctgcactttgtggagcaagtggccctggcgccgcccgaggtgcagatcgacctgcagcagcagcaggagtatgagcagcagctgcaggaggcagccaacctgccactgccagatgcagacgatgatgacctggcagagtagattgttc

SEQ ID NO: 2118 - DNA, 447 bp, Chlorella vulgaris
  unsure (1)..(447): unsure at all n locations
ggtcctccggtctcgcaataaatccagagaaatcactatgcaggcaaccatgatgaagaccttcggcgccagcctgcgcaaggctgtgcccacctcaggcaagggcacccgccaggtgacccgcgcctccgtggagtggtacggccctgacagggccaagttcctgngccccttctctgagggctccacccccagctacctgaagggcgagttcgccggcgactacggctgggacactgctggtctgtctgccgatccccaaaccttcgctgcctaccgcgacgttgaggtcatccatgcgcgctgggccatgcttggcgccctgggctgcctgacccccgagctgctgcanaacgccggcgtggccagcttcggcgacgctgctgtgtggttcaaggctggtccctccatcttcggcgatgatggcctgaactaccttggcaaccc

SEQ ID NO: 2119 - DNA, 71 bp, Chlorella vulgaris
cccaggcagaaacacaatggtggctctccagattctcgcagcgactgccaagggcaccgtcaagggtaccg

SEQ ID NO: 2120 - DNA, 334 bp, Chlorella vulgaris
tcttggaacctccaaattagcaaatggcgaaagggaacagacgtagtaaaactgcaaagcagcatgctatggacgaggatatcccccaagatggggctcaatggcaaagcggaacatcagcagaaaccggtgaagatctcataggtatggacacagctgactttggaggcaagctaagtcaacagcagcgacctatgaaggtgccacagggcaagcgtggcaaccgcacccgggcgcagaagattaggaagtctggcaagcttgagaaggcgctgaacctgagtgcgaagctagagaagaaagtggggcggaccagcggggtcatgcaggcccg

SEQ ID NO: 2121 - DNA, 299 bp, Chlorella vulgaris
  unsure (1)..(299): unsure at all n locations
ctccaaatgcgtgtttgtctttggcctgaagacncagtttggtggcggcaagtccacaaggtttggcctcatctacgacaacgtccacggggccaagcagttcgagcccaagtacaggctcatcaggaacggtctggcgcagccggtgcagaattcgcgcaagcagcagaaggagcgcaggaaccgcaccaagaccatccgcggtgtcaagaagaacgcagtggccggcaagaattgagcgggcagcagcatgcagccctgagccaacctgcagctctagtaccgcctgtaacatacct

SEQ ID NO: 2122 - DNA, 403 bp, Chlorella vulgaris
  unsure (1)..(403): unsure at all n locations
cctgcgcaggtgcgcagctctgtggcagtgaatgccaagagccccggcacccccgcttgggcacctgagcggcccctttggctgcccnggtacactcnccctgcccacctcgatggcaccctggttggtgactttggctttgaccccctgaacctgggcgcgaacgccaanggcctttagcngtatgtgcaggctgagctgcagaatggccgctgggccatgcttggcctggcaagcatgatcttccccgagctgctcaactgcgccggcatcttcactgcccccaactggtacgaggcgggcaaggtgtctgctgagagcggcgccatccccattgccacccagctgatcatcatcgtcttcagcctccactttgtggagaccaagcgcggcatggactatg

SEQ ID NO: 2123 - DNA, 310 bp, Chlorella vulgaris
  unsure (1)..(310): unsure at all n locations
gtccttcagcgagaccgtcatcggcacctctgacaacgtggtcatgtcaaagtcgcccaacaagcacaaccgcctgtacatgcaggcccgccccatggaggacggcctggctgaggccattgacgagggcaagattgggccccgcgacgaccccaaggtgcgctccaagatcctgtctgangagtttggctgggacaaggagctggccaagaagatctgggcctttggccccgacaccaccggccccaacatggtgaccgacatcaccaacggtgtgcagtacctgaacgagatcaaggactctgtggtc

SEQ ID NO: 2124 - DNA, 405 bp, Chlorella vulgaris
cttagctgtgcatgcggagcccacgatatctgaggatgtgactgtcaataacgatgagtgatgtgtaggcgccggtagcagcacgatgtcatgatggcatgcgggacttgaggtacaatatgctgcctgcggcacaactaggcagtctcatgggatcgccgtggcgcttggtgaaggttggcgccctgtagctgtattggagttcggctatgactctggtagtccggcaaacgggcaatgcctcagcgggctggtgcgtcgcacagtgcatagcctctgcaagcgggcactgtagtactcagatcgcacagtggactgatgtatgagtattcggctaatgtctgtgtacaactttgcatcctttggtgaggactgcctacgtatggccttttactccgatttgtg

SEQ ID NO: 2125 - DNA, 102 bp, Chlorella vulgaris
tggtaatggtgtttgcctgcgaggaggtcgaccccatgtttgacaggacctcccggaaacggacgtagaagtggctgtgctcatcgggatctcggaacaact

SEQ ID NO: 2126 - DNA, 416 bp, Chlorella vulgaris
gacacccgcacattatggcggagtcggtgcagaccttcgggcgcaagaagaatgcagtggctgtggcctactgcaagcgtggaaagggggagctgaggctcaatggctcccctctggaccttatccagcctgacaccatgcgctacaaggtgctggagcctgtgctgctcctgggcaagcagcggtttgccaacgtggacatccgcatccgcgtcaagggcggcggccatgtgtctcagatctacgccatccgccaggccatcgccaaggcgctagtggccttctaccagaagtacgtggatgagcagagcaagaacgagatcaaggacatcctgctgcagtacgacaggacactgctggtcgccgatcctcgccgctctgagcccaagaagtttggcggtcatggtgcccgcgct

SEQ ID NO: 2127 - DNA, 412 bp, Chlorella vulgaris
cttgaatatcaagcagagatacttgggcttacttgagctggttgctgcacacctgtgtttgcattttgtgttgcgttttgggaggcttggttcctgccggctacgccgcttggcgcttactggtaagtctcttgtttacagccctgctatctctctgcccctgaaaatgaaatcggtcattcttgcgcacactggtagagcaatagtttgccaaccctgtctgtgtggtgctgtggggatgttcctcatacaaattgggctgctgaagtgttgcatcagctgttactgatatgaaaacggacaagcatttgtctgctgtgtcatagaagtccagccagtcctactgtcacgtataaaccttaggagagtgagtgcggtcaacatgctttggcatggacttgtctatctgtac

SEQ ID NO: 2128 - DNA, 410 bp, Chlorella vulgaris
tcaaagcaaatttgccatagtactgacctggtcttgttgcatgtcttgcggcagagactctctacaatgctgagaagcgcggaaagaatcaggtgctgcttcgcccatcctccaaggtggtcatcaagttcctccaggtcatgatgaagcatggctacattggtgagtttgagttggtggacaaccaccgctctggcaagatcgtggtggagctcaacggcaggctgaacaagtgcggcgtgatctctcctcgctacgatatctctgctgttgagattgaggactggattggtcgcctgctgccctctcgccagtttggctacttcattctgaccacctcccagggcatcatggaccacgaggaggccagtcgtaagaagattgggggcaaggtgctcggcttcttctac

SEQ ID NO: 2129 - DNA, 414 bp, Chlorella vulgaris
gagaccatgcataaaacctgccgccatgggtcgtatgcactccaagggcaagggcaagagccgctcggctctgccctacaagcggagcccgccctcttggctcaagatttccagccaggaggtgaacgagctcattggcaagtttgccaagaatggcctgaccccctcccagatcggtgtgctgctgcgtgacagccacggcgtggcccaggtcaagtctgtgaccggcagcaagatcctccgcatccttaagggccagggtttggctcctgagatccccgacgatctgtaccatctgatcaagaaggccgtgtccatgcgcaaacacttggaggccagccgcaaggacagcgacgccaagttccacctgattcgggtggattcgcgcatcgacggcctggccccgctactaca

SEQ ID NO: 2130 - DNA, 330 bp, Chlorella vulgaris
  unsure (1)..(330): unsure at all n locations
acgcgtaggctggcatggtggtactacaagtgccgggtgcggccctgggtgcagcagctggcggctttgctgacggcggcggcctctgcggttattgtgtggtcagagggccacattgcaaccgggactaccctgactgtcaccttttcgctgatgattcacagtggcgagtccaagggcgagtttgtgacgcagactttggtcgcgatnacactggcctacatttgcagctgcgcctacttctcgctgttcaggttggggaactttggcttctatcagatggtgacacgagcaacctgnggctactccctattgctcagcggctcgctg

SEQ ID NO: 2131 - DNA, 411 bp, Chlorella vulgaris
acgcgtacgctacaatcggccaacatggttagccgtctgagcaagaaccgcaagaagctcggtcatgtcagcgccggccatgggcgtatcggcaagcacatgaagcaccccggtggccgcggtaacgccggtggccagcatcatcacaggattatgatggataagtaccaccctgtgtactttggcaaggtgggcatacactacttcaacctgaagaagaacaagttccactgccccatcgtcaaccttgacaagctgtggagccttgtgggcgaggaggctcgtgttgaggcctccaaggactcgagcagcgctgccgtgattgatgtcaccaactatggcatcttcaaggtgctgggcacggtcgagctcccgcagcagccagtggtggtgaaggccaagtttgtgagc

SEQ ID NO: 2132 - DNA, 443 bp, Chlorella vulgaris
  unsure (1)..(443): unsure at all n locations
ggaccaggtgacgttgctgtaagaggccgcctcnctcactggtggctttgccattgacaacccccaggactttgcctcccgcatctactccctcatgggtggcagcagcggcggcagtgtcagttctggcagcagcaagagcagcagcaatggcagcagcagcgctggggtgcagcaggtggatgccgaggtagtctagtaggtatcacgcggtgttgtatgcttggcgtttgttgtggcacagagcttactgtgcttggtatctggtacacattgtaccatcattctgtttcccttgttaaagctcggcaagtcctccttcaatagctcaattcttgcaactatcctaagttgccaccccctttcagtgtggttgagtttttgaccgccccttgatgaattctacctgcgcccttaaacaaggtccgttgtgggccttccac

SEQ ID NO: 2133 - DNA, 446 bp, Chlorella vulgaris
cgtccgcacacgcgtacgcccacgcgtccggtcggccaacatggttagccgtctgagcaagaaccgcaagaagcgcggtcatgtcagcgccggccatgggcgtatcggcaagcacaggaagcaccccggtggccgcggtaacgccggtggccagcaccatcacaggattatgatggacaagtaccaccctgggtactttggcaaggtgggcatgcgctacttcaacctgaagaagaacaagttccactgccccatcgtcaaccttgacaagctgtggagccttgtgggcgaggaggctcgtgttgaggcctccaaggactccagcagcgctgccgtgattgatgtcaccaagtatggcatcttcaaggtgctgggcaagggcgagctcccgcagcagccagtggtggtgaaggccaagtttgtgagcaagctggcggagcagaaaa

SEQ ID NO: 2134 - DNA, 435 bp, Chlorella vulgaris
cgtccgcatcagctaaacttccaatccgtacctcaggctcgcattccattgatgcacaagaagggtgggcataaagcccatgctagtaatgcgttctctgctttagcagcttacgaagacgcagacgctttgagagaggaagttgcagcttcacttgagaagagaagaaatggcagcactgatccggccgcccccagcgatagtgggagtggggtcggcttcaagcagccattggtgtggatcgaccttgagatgtcaggcctcgacttggacaactacaccatcgtggaaatagcctgcattgtcacagagggtgacctcagcggcgcggtggatggccgcgagatcacaagacagcactctgacgatgtcctggcctccatgaatgactggtgcaaggaaaacgacggcaagagcgggctgacgcaagcggtg

SEQ ID NO: 2135 - DNA, 334 bp, Chlorella vulgaris
cacaatgacgaagcgagacaagaaggtcggcattgtgggcaagtacgggactcgctatggtgcgagtctgcgtaagcagattaagaagattgaggtcagccagcattccaagtacttctgcaccttctgcggcaagttctccatgaagcgccaggctgtcggcatttggcagtgcaaggcctgcaagaagactcttgctggtggcgcctacgtgtgcaacaccgccgccgccgtgactgtccgctccaccatccgccgtctccgctagcagattgagaagtaatgatccaaacccacaaaggcagccgctacatcagcagcaagccaaccacta

SEQ ID NO: 2136 - DNA, 423 bp, Chlorella vulgaris
cgacggaggagcggatcacggaggcgcagagcatcaacaagagcctgaccacgctgggccgcgtgatctctgcgctggtggagcgccagaagcgcccctccacgcacgtgccctacagagactcgcgcctcaccttcctcctgcaggagtccttgggcggcaacagcaagacatgcatcatcgccaacgtcagcccttcggcagagagcgcgcaggagacgcacagcacactgctctttgctgcgggggccaagaagattaagagcaaggctgtggtgaacgaggacacccagggcgacatgcgcgccctgcagctggagaatgtgcggctgtcgaggctgctggaggaggcgcgggcgcagctggcggcgggcgccgaggcgctgcacacagcagagcaggcggcgctgcgggagcagctgc

SEQ ID NO: 2137 - DNA, 375 bp, Chlorella vulgaris
  unsure (1)..(375): unsure at all n locations
acgcatccgcgaccctggcgacattgtggaactgtacatcncacgcaagtgctcgtggaccaacaagctcatcacggccaaggaccacgccagcgtgcaggtcaatattggccacctggatgagaatggcgtgtacactggcagcttcagcacctttgccctgtgcggccaggtccgctccaagggtgaggctgatgccgctatggacctgctctggcagaagaagaaggctgagattggccagcagtgattggagcttgagcgcgggcagcacgctgctgtgcacgctgtgatgccctcggagcaaagcgggcagtgcacggtcatggcagttaccatttggcagcggcatgtgtaacaccttagccagaaaaa

SEQ ID NO: 2138 - DNA, 428 bp, Chlorella vulgaris
gctcctgcaaccttgctggcttgacaccctttcgcaagtaccagcactagcatcatgcagacagccctccgctccaccctcttcaccgcccgccctgcgcaggtgcgccgctctgtggcagtgaatgccaagagccccggcacccccgcttgggcacctgagcggcccctttggctgcccggtaccactccccctgcccacctcgatggcaccctggttggtgactttggctttgaccccctgaacctgggcgcgaaccccaaggcccttgagcggtatgtgcaagctgagctgcagaatggccgctgggccatgcttggcgtggcaggcatgatcttccccgagctgctcacccgcgccggcatcttcactgccccgaactggtacgaggcgtgcaaggtgtctgctgacagcggcgccatccccat

SEQ ID NO: 2139 - DNA, 324 bp, Chlorella vulgaris
  unsure (1)..(324): unsure at all n locations
cacgtacagaattagacctgngtgtggagtccattgcgtggttcagctacgacgctaagcgagtgtgcggagacgtgctggcttcagccaagcgcaattcgcggttcctgttcatgaaggagcctgtggcggtggtaggcgcactcaggccttggaacttccccttctcgaggattatacgcaacgtctcgccaacgctggcggcaggctgcacggtggtcctcaagcccagcgagctgacgccactcacagcgctagcgcttgtaacgcttgcttagcgggctggggtgccgcaaggggtgctcaacatgcctggtgggtgat

SEQ ID NO: 2140 - DNA, 398 bp, Chlorella vulgaris
  unsure (1)..(398): unsure at all n locations
cacatcatagaagggccacaggcacctgcggtcttanggcttgctgttggcatacttaccctttgctgctcaacgtctttgacactgtttgcacgatgcgataacccagtagaagctgggctgccgactcagcagttctggtacaatgatgttacccaggagagcgtgtggagcaagcctgagtatgaattcaaggacgaggagtcncgcacatactacgtagacccagtttccaaggcggcatcctgngacaagccagaagccctgcagtggctagaggcaacggacgagcaaggtangacgtattattttaacgaggtcagtaaggagacaacctgggacaaaccttacatcctcggctggcggcaaatcccggtctccgaagggaacaaaacgga

SEQ ID NO: 2141 - DNA, 401 bp, Chlorella vulgaris
  unsure (1)..(401): unsure at all n locations
cacangatgcagaccctctctgcccgtttcggcgtccgcgctcctgtctcccggggcacccgccaggtgacccgcgcctccgtggagtggtacggccccgaccgcgccaagttcctgggccccttcaccaaccccccttcctacctgaagggtgagttcgctggcgactaccgctgggacacctctggcctgtccgccgatcccgagaccttctcccgctacagggaggttgaggtgatccatgcccggtgggccatgcttggcgcccttggctgcgtcgtgcccgagctgctggaccgcaacggcaccgtcaactttggcgagaacgccgtgtggttcaaggccggtgccgccatcttcggcgatgacgggctgaactacctgcgcaacccctccctcat

SEQ ID NO: 2142 - DNA, 346 bp, Chlorella vulgaris
tttgtaacatctgaaactagccgaggttacaacccagctaacatgcagattttcgtgaagcacctcaccggcaagacgatcaccttggaggtggagtcgtccgacaccatcgagaacgtcaaggcaaagattcaggacaaggagggtattctccctgaagagcagcgccttattttcgccggcaagcagctggaggatggacgcaccctggccgactacaacatccagaaggagtctaccctgcacttggtgctgcgcctgcgtagtggcatgcagatttttgtgaaaacgctgaccggcaagaccatcacgctggaggtggagtcctcggacactattgagaatg

SEQ ID NO: 2143 - DNA, 432 bp, Chlorella vulgaris
gtaacggtgatgcattgaccccttggcctggctgacgaccccgacacctttgctgagctcaaggtcaaggagatcaagaacggccgcctggctatgttctccatgttcggcttcttcatccaggcacttgtgaccggcaagtctcccctggagaacctggccgaccacctggctgaccccgcctccaacaacggcttctccatcctgaccgccaccaagttcaccccctgaattcagccctgaattttgagggaaatcccctggctgctgctagttcctcgttgttctagctcttggttggttgccggtgtgtcgctgttgtgtgaaggggagaagcgtgaccccttggttgtctactggcagcagcagcagcagccagcagctggacggtcgtattgagatgtgtgtgacgcggcaaaattcgtaacgcac

SEQ ID NO: 2144 - DNA, 382 bp, Chlorella vulgaris
tcgtgggcacacccatgcgctgcgcgccaaggtctccacccaggccactcgtggctccaacgtagcaaccgccatgcgccgcaccgtcaagtccaagaacgtgaagaccaccgacaccagccagtggtacggtcccgaccgccccaagttcctgggccccttctccgagggtgctgtgccttcctacctgaacggcgagttcgctggtgactacagctgggacaccgccggcctgtccgccgaccctgagaccttcaagcgctaccgccagattgacgtcatccatgcccgctgggccatgcttggcgccctgggctgcatcttgcccgaggtcctgcagatgtacagcagcatcgagttcggcgaggctgtgtggttcaag

SEQ ID NO: 2145 - DNA, 428 bp, Chlorella vulgaris
gccgcgtgggcagacgcgtaggcggacgcgtgggcggacgcgtgggctgaggcaagccgggaatcgagttggccttgagccgacgcgtttgacgcccgcagcagcacctaacacacgcaccaggcaccatgctcatctccaagaagaacaggcgtgaggtgtacaagttcctcttcaaggagggtgtgctgtacgcggagaaggacttcaacctgccggagcaccccgagattgagggggtgtccaacctggaggtcatcaagctgatgcagtccatgaagagcaaggacttggtcagcgagcgctatgcctggcgccactactactggttcctgacggacgctggcatcgatcacctgcgtgagtacctgaacgtgcccagcgagattgtgcccgccacactgaagaaatcgactaggcctctggag

SEQ ID NO: 2146 - DNA, 485 bp, Chlorella vulgaris
  unsure (1)..(485): unsure at all n locations
gcgtccgcaggttgctcaccaccggcgcgcgtgagtccgccttccgtaacatcaagaccattgccgagtgcctggccgacgagctggtgaatgccgccaagggcagcagcaacagctacgccatcaagaagaaggacgagatcgagcgcgtggcaaaggccaaccgctaagcgccttctcacatcatgtctgctggcgcgcaatgagagcttggagctggggaggagcagcggcgctgttgtagatctggcgtgggcgggggtgttggagggatgcaggcgggcggcgtgccgcgcctgcgcttgttgctgctgccgtttcatgcctgctggtaggagccgangcaaatggcgcagactggccaactgtggcgttggcgtangcacttggtcatcgtangatgtggcttgngagcggcttcgcgttggtcggggtcagcagcagtgctggcctgtagcagcatgcacttgaggacacaaggctgc

SEQ ID NO: 2147 - DNA, 285 bp, Chlorella vulgaris
  unsure (1)..(285): unsure at all n locations
tataatcacatggtctgtaaactcactctatgacacttcctctgaaaggagaatttcgcagtactgcccngcgtgtgtgagttctctttactgtagtacgtgtaggatctgcagctagaactatggttgcgtatgctgcctctccttctcagcatcacggngtgactgactgcagcaggtgtgtgcacagacggtttatcatgcttgtgagagtgctgcgcttcatattaagtcagaatgcatgaacgttctcggcacgccttcattactgctgtctatgctgct

SEQ ID NO: 2148 - DNA, 328 bp, Chlorella vulgaris
agcccacgcgtccgcaacaaggtgcccagtgaggagatgggctaccccggcggcatcgtcgaccccctgggcttcagcaagggcgacttcaagcagatgaaggagaaggagatcaagaacgcccgcctcgccatggtcgcctttgtgggctttgtcatccaggcgcaggccaccggcaaggggcccctggccaacattgccgaccacgtgtccaaccccttcgcccagaacatcaccaagaacattggcaactgcatgatccccgagtccgtcgacatccagggcctcacactgccgctcttctgcctgtggcccggctcccactgag

SEQ ID NO: 2149 - DNA, 375 bp, Chlorella vulgaris
cgacccacgcgtacgcccacgcgtccgcggacgcatgggggcttgcgcgccgccgctactccctgtggcatggttatacctggaggtgaccttttgttgcaggaaggaggccctgtttcacaagtacagctcccattctttagcttggcgggaagcttgcattctgccagtagtcgactgcgtgcactcaatctagcaggctaaacttgaacgggcgcaagttgtcagtgctggggcacttgtcagccacgatgtgtacttgaaagatagatggatcgctccgggtacatatgaacaatagcactgttcactgtgccctgccttatgaaacgtggttatgtgagccaatacaaagaccttgccttagtgtgatac

SEQ ID NO: 2150 - DNA, 317 bp, Chlorella vulgaris
  unsure (1)..(317): unsure at all n locations
ggcttcaaaaaggaagggcggcgttggtggcaacaagttcaggatgtcgctgggtttgccagtggccgcaagaatcaactgcgctgacaactccggcgccaagaacctgtacatcatctccgtggccggctggggcgccaggctgaaccgcctgcacgccgccgcccccggcgacatggtgatggccaccgtgaagaagggcaagcctgacctccgcaagaaggtgcaccctgcggtggtggtgcggcagcgcaagtcctggangcggaaggacggcacctacatctactttgaggacaatgcaggcgtcattgtga

SEQ ID NO: 2151 - DNA, 330 bp, Chlorella vulgaris
  unsure (1)..(330): unsure at all n locations
tgtctggtgctgaacagcanatacngctggtctgccaccatggagcgcatccagcgggcgcatgcgctgggagactcggagcgagccaagtacatgcgcggcagccgcacctttgagatcaacccaatgcaccgctggtccgggagctcaaagcgcggcacgctgccgaccccgaggacgagaanactaaggatgtggcccgcctgctgtttgacatgtgtcttatggantcaggctttgtgctggacgatgtgaacggtttcaatgccttggtcttcaggatgctcaaggacagcctagacatcaaggactggagtgtggatgctgacg

SEQ ID NO: 2152 - DNA, 384 bp, Chlorella vulgaris
aatgcagagcttcgctgtcaagcccaccctactgcgcggcgcagcccgccccaggctggttgtgagggccgaggaggctgctaccgctgccccagccaagaagcccgacgttggtccgaagcgcggctccactgtccgtattctgcgccccgagtcctactggttcaaggagaccggcaccgttgtgtccgttgaccagactggcatccgctatccagtggtggtgcggtttggcacccgcgtgtcgtactctggggttgccaccaacaactttgcccttgacgagattgaggaggtcaaggcatagatgtccatcttggggaacagcagtaggagcagcagcagcagtgacatgttatatatgcgccaactgagacgaatacg

SEQ ID NO: 2153 - DNA, 366 bp, Chlorella vulgaris
agcccacgcgtccggctgaggagcaggcatggtgctcaagacccagacttgccgcttcagcggcctcaggatttatcctggcaagggaatcctgttcatccgtgttgatggccagcaattcctcttcctgaagcagaagtgcaagagcatgttcaaccagaggaagaggcccgcaaagattgcttggaccaccctctacaggaagcagcaccgcaaggaccaggaggcgcaggttgcgcgcaagaagcgcaggtctgccaccaaggtgcagacgcgctcaattgtgggcgtgtccctggaggtgattcagaagaagaaggcagagaagcccgagcagcgcaaggcctcacgccaggcgggcctccg

SEQ ID NO: 2154 - DNA, 220 bp, Chlorella vulgaris
cccacacatccgcccacgcgtccggttttggagacccgtgcagaagacctgccgccatgggtcgtatgcactccaagggcaagggcaagagcctctcagctctgccctacaagtggagcccgccctcttggctcaagatttcgagccaggaggtgaacgagctcattggcaagtttgccaagaagggcctgaccccctcccagatcagtatgctgctgcg

SEQ ID NO: 2155 - DNA, 357 bp, Chlorella vulgaris
acccacacgtccgctacatgcagccgcccggacaacgagcggcagctagcaccgacaagctacatcatggcggtcggcaagaacaagcgcctgtccaagggcaagaagggtggcaataagaagattgtgtaccccttcagcaagaatgactggtatgacatcaaggtacccagcgccttcaatacccgcaatgtgggcaagactctggtcaccagcacccacggtaccaagatcgcctcagacggtctgaaaggccgtgttattcacgtgtccctagccgacctgcacaacagtgaggctgatgcctaccgcagcatcaacctgcgcattgatgacgtccatggccgcaactgcctc

SEQ ID NO: 2156 - DNA, 416 bp, Chlorella vulgaris
acgaaatttcttgatcaaggcaaccagccccagttgccgagcccccagggcaccctgatcggtgctatgcagcctcatcggcagctggctcatgccctgaagctgcaaaggggtgtgaatggctatcacatctcgcgcattggcacggcactggctcgggcgctgagcagcagctgtgggcccacagaccagctgcttcagcacgttaaggatccagctatagtaaaaaccgattctttcgtcggtgggaagtgggtcaaggcgaaggacggagacactgtcaaggtgctgaacccagcaactggtgagcagcttgccaccatacccaacctcaagggccctgacactgacgctgccatctctgaagcggcagctgcgttcggctcctgggccagccgtaccggcaaggagcgcgc

SEQ ID NO: 2157 - DNA, 331 bp, Chlorella vulgaris
gcgtccagctgaatccagctaccactggtgactttggtgccatgcctggccacctgccaacagtagctcagctaaggcctggcgtggtgactgtgcacacggaccttgacaaggatgtgacgaagtactttgttacccgccgcttctcagtcatccaccccgactcctcggctgacatttgtgctgtggaggctgttgacgtaccagaccttgatgccgacgcagtgggtgccggccttgctgactacaccggcaacccgggcgtccgcccagggaaaggatgactaccaggcggctgcagcccagctcggcgtggaagtctactccgcca

SEQ ID NO: 2158 - DNA, 134 bp, Chlorella vulgaris
  unsure (1)..(134): unsure at all n locations
ttttctgcaaaacagacaggactcatctccttgagcttagctgcgaggccactgtggccgatcgtcgaggctnccatctaggccagccagggcatccccctgcgatgcgcagcgtgtgatgttctctggtcgcc

SEQ ID NO: 2159 - DNA, 231 bp, Chlorella vulgaris
ccgcgcacaacctcaccagcaaggtcacgacagtgcacgcgaggcgttgccaagaggctggaggctggcaccctggttgacggcaagctggaggacaatgtccacgtcagcgtgctgtacgacgacgaggtgcggcccaagaccaagatgggcctcagcgcgcagttcgacgccctcaacctgtacaaggcgcccaagttcggcttcgcctacgacctcaagtactgaggg

SEQ ID NO: 2160 - DNA, 239 bp, Chlorella vulgaris
gacccacagcgtccagcttcaccatggtgaagtacgctaaggaggtggacaacgccaccaaggccgccaaggcccgggggtctgacctccgcgtgcacttcaagaacacgcgcgagtccgccgcaggcatccgcggcaagagcctggtgaacgccagggcgtaccctggaggctgtcattgatcacaagcgctgcatcccgttcctgcgctacactggtggtgtgggccgcaccagcca

SEQ ID NO: 2161 - DNA, 276 bp, Chlorella vulgaris
acccaagcgtccagtccccgtctcgcaatatttccagggcaatcactatgcaggcaaccatgatgaagagcttcggcgccagcctgcgcaaggctgtgcccacccagggcaaaggcacccgccaggtgacccgcgcctccgtggagtggcaccgccctgacagggccaagttcctgggccccttatcggagggctccatccccagccacctgaacggccatttcgcccgcgactacggctgggacaccgctggtctgtctgccaatccccagctct

SEQ ID NO: 2162 - DNA, 416 bp, Chlorella vulgaris
acccacgcgtccggtgctagggaggcaggtatgcatggtggcaaaaggtgatcttttacctggtgtgcatactgagactccttattctcgccaggccgcatggccgccctatgtattctttcattacttgctacacactgtgctggcagaatggtgctccatcgtggcctttggtggcgagggaggcacacagcatgtgtatatggactgcatgcgagggtttgggaggagcatgcaaggttttgtacttttggtaaatgttgcgagaccatgaagcacaggtgtgcgcaatggaggcaatggtttcgtgggcagtctaagctagtatcatgtaggattggtactgttgcaagttttgtcagtcgtcccttggtgttgtttgccgctttgggtttttgctagagactgcactacca

SEQ ID NO: 2163 - DNA, 113 bp, Chlorella vulgaris
gcttgcacccagtcgtgtctttgactcccgcttaggcaccagcttgactacatcaggccctcactgaggcataccctgttccacgcccggtgttctgccctaacgtgcaggga

SEQ ID NO: 2164 - DNA, 92 bp, Chlorella vulgaris
cagccaaccatgtccgtggatgcgtcgcgcgtgagctacttggttcccagtataggtatgccaggaggcacaccactgccgcttgccgcatg

SEQ ID NO: 2165 - DNA, 417 bp, Chlorella vulgaris
acactggtggtggcgcgcgtacttcaccagcggcagcagcgcgctgtacctcttcctctattccatgttctacttctataccaagctggacatcaccaagctggtcccagccatgatgtacttcgggtacatgagcatcgtgagcatcaccttctttgcgctcacgggaaccatcggcttctactccacatacattttcgtgcgcaagatttacgctgcggtgaagattgactaggccggagtgaccaagccagccctctggccagttagggttaggtgcccagcccttcggtggatctaggggacggtgggtgaaatgttggtagggtggctctgttcggacatggctcctagtactagccacgagacggcggtcctgatgcgcagcatggagcctggaggcaggtgtaggttgtt

SEQ ID NO: 2166 - DNA, 163 bp, Chlorella vulgaris
acccacgcgtcaacccacgcttccggctgcctgacccccgagctgctgcataacgccggcttgtccaccttcggcaacactgctttttggttcaaggttggtgctccaacctccggcaataatggcttaaactacttgggcaccccctccttgttcaatccca

SEQ ID NO: 2167 - DNA, 151 bp, Chlorella vulgaris
acccaaacgtccacccacgcgtccgggttactctggtgtggacgtccgtgtgacacccatgcgcacggaaatcatcatccgtgccacccgcacacagaacgtgccgggggtcaagggacgccgcatccgcgagctgaccagcgtggtgcac

SEQ ID NO: 2168 - DNA, 98 bp, Chlorella vulgaris
gacccaagcgtccacccacgcgtccgcccacgcgtccgcccacgcgtccgcccacgcgtccgcccacgcgtcggcccacgcgtccgcccacgcgtccg

SEQ ID NO: 2169 - DNA, 385 bp, Chlorella vulgaris
acccacgcgtccgcggacgcgtgggcggacgcgtgggtggcaacgtgagcctggacgaggtgaccgagtctaacggccccgtcaccgagctgaagcctcaggacaagtggattgccccttaccagccgtacgcacatggctggtggaatgtgtttgagcgcaagtgaagcgccccttgcctgccgagtgcgtgtgttggcggaagtgcggggggaacagagacgcagcgttggtcacatggcgcgccgtgccccctgccttctccgtgcgtgaagagaatttagtcccacttttgcccatgggggtttttcagttgagcagcagtgaatgtgctcgctcggctgtgagtttggtgtgttgtgcgcgtggggccagtacctgcagt

SEQ ID NO: 2170 - DNA, 229 bp, Chlorella vulgaris
ccgggcctgacccacacgtccacgcacgcttcagggatattgacgtgatccatggccgatgggcaatctgctgcgcactgaactgccttccacgtgcactggcgctccattgttctaaacgtgactcccccatagcggttctttgtgtcacttggctcaatgtcagatgggatatcgcccttttgtgcatgatggcatcaaacaccatcctgcccaacctcatcataca

SEQ ID NO: 2171 - DNA, 282 bp, Chlorella vulgaris
gacccaaacgtccagctgcttgaccagaccaaccacgtgccctggttcaaggctggcgcccagatctttgcccccgagggcatccactacctgggtgtggatggcctgatcaatgccaagagcattgtggccaccctcattgtccaggttgtgctcatgtcctttgtggagggctaccgcatcaacggcggtcccgccggcactggcctggacaccgtgtaccccggcgaatcctttgaccccctgggcctggatgacgaccccgacaacttcgccgagctg

SEQ ID NO: 2172 - DNA, 248 bp, Chlorella vulgaris
gcgtccagctgatccattgtatggcgccgtgtactgcatgttgggcagggagtgtcaggcgcgacacgctgctctttggggcgcccaagacccgggcggagtcggaacggcagagcttggcgtggttttgtgggttctaaccgtcgtgtggtatacactccagcctggaagcagggggccccggtggcctgtggggacactgatagtgcaacgaatgtgctaggcagcgcgacggtgttgtcgttgtt

SEQ ID NO: 2173 - DNA, 401 bp, Chlorella vulgaris
aggagcggttgctgtcttcaggaccgcacacagccaagatgaatgtggaaaagctgcagaagatggccgggagcgtgcggacgggcgggaaggggtctgtgcggaggaagaagaaggcggtgcacaagaccacctccaccgacgacaagcgcctgcagaacacgctcaagcgccttggggtgaacaccatcccgggcattgaggaggtgctgctgctgaacaacgacggcaccgcgctgcagttcaacaaccccaaggtgcaggcgtccatcgccgccaacacctatgttgtctccggccccgcgcagcagaagcgcgcccaggacgtgatggcgcagatgcctgcgggcatgggcggcatgccgggcatggcgtccatcatggcgcaaatggccgctcgc

SEQ ID NO: 2174 - DNA, 414 bp, Chlorella vulgaris
acgctcttgcattgctaggtttgtcttgagcttcgcccgacaaaatgtcgagccaacttgtgtgggagcttgtgaagcacaacaacgcattccttgtgaagggcgtgaacggcaccgtgttcagccgggaggctggtaacctgtataaccgcaactcctacaagtattctggcctggccaacttcaactccactgtggatgttgctgcggctaaggatggcggggtgcaggtgtccaagtcccgtggcaagaacgccagcaagcccagcgctgcccgtgctgtgtctgtaatcaagaagaacgctcgccgcaccaactacgctgtcggcgctgaggcgcagcgcgtgcgccccgacctcaagaaggctgccgttgcccgtgcctccgccgtcaccaagagccagcgtgtgaaga

SEQ ID NO: 2175 - DNA, 218 bp, Chlorella vulgaris
gcgtccacccacagctcctcccacgcgtccgcgcaatagttccacggcactcactcatcagcgcaacatgatgaagaccttcggtgccagcctgcgcaccactgtgcccacccagcggcaagcggccacccaccaccgtgaccccgcggctccctccagtgatacccgccctcacagggcccaacttcctgggccccttctctgagggctccaccgcc

SEQ ID NO: 2176 - DNA, 119 bp, Chlorella vulgaris
gacccaaacgtccaagcacgcgtccgatctgattctagccaccccggttggctagagagagttggttattctttgtaccctcgtcatgagtttgacagaagggaacggcttttgcgagg

SEQ ID NO: 2177 - DNA, 403 bp, Chlorella vulgaris
agggcccgcctgtacagccagacacgatgacaaagaagaggaggaactcgggtcgcaacaagcacggccgtggccatgtgacccgcgtgcgctgcgaatcctctggcgtgctggtccctaaggacaaggccatcaagcgcttcattgtcaggaacatcgtggatgcctccgccatccgtgatatccaggacgcttgtgctattgatgggtatgcgctgcccaagctgtaccgcaaggtgtattactgcatcagcgcggctatccactccaagattgtgcgcgtgcgcagccgcaagaacaggcgcaacagggagccgcctgcacgccctggtttcgggccccgccgtgagggccagcatggcgggcagcagggccagcatgggggggggcagcagggaggaca

SEQ ID NO: 2178 - DNA, 102 bp, Chlorella vulgaris
gaacaccttacaatggctccttcagggaagaaggatactactgcccccaaggcggcaaaggccgtcaccaactccaatgtaacaatactctcaagccccgct

SEQ ID NO: 2179 - DNA, 417 bp, Chlorella vulgaris
acagacggggcatgtgccgtagacgcgatcgtgctagccaaacagcaatataagcctcgatgagacacatgaggcttatgtagtagattgtgttgcaattcaaaagagaaaaataaacaattgaagagcggaagtaagggtagttggtttgtcaagcccgatctgtgtatcgtgcaggcggctcagcgcagcgaggtgcggctgtactacggcgccaggaccccagaggcaatggcataccgcgagcgggtggcggagtgggaggcggcaggggtcaaggttgtgcccgtctactcggagaagggggagggctatgtgcaggacgtgttctccaaggagaatggcatcgaggactggagcggcgtggcagcggtgctttgtgggcacaaggggatgtgtgaggcgattactgaggtg

SEQ ID NO: 2180 - DNA, 346 bp, Chlorella vulgaris
acccacgcgtccgctttgtcaaggcgaccttctttgcgctggccgccacctacggcttcctcacgcccgagctctggcgcgagaccgtgttcgccaagtcgccgctgcaagagtttaccgatttcctcaacaagcctgtggtccggaagggctactgaacaacaaacagtggcgggagcagcagcagccattgaagggaaagcctggcttggaaggctgtatcgagggctgggcacagggtgggagacacggtgtacaacgggagatgaattttattttacacaacatgctttccacgggaaagcgccacatctctgccactgacaaaactttcgtgaaatgtggg

SEQ ID NO: 2181 - DNA, 260 bp, Chlorella vulgaris
gcgtccgcggcaagtggcacgagcaaggccaagacacgagcagcaattgcggccggcacgcagagaaagggtgcggcagacagcagcacgcctaaaaacgacgagcgaggtgcaggtgccagcaggcccggaaaagctgctgaaggcgcgagtaagcccaagaagcatcaacggacgaggaagaagatagagggcaacgtgcaaaggaaagcaacgctgttgcgcaagaagggggcacagaagcacaagcagaggcccaa

SEQ ID NO: 2182 - DNA, 421 bp, Chlorella vulgaris
accgggtcctgccggcggtggagcacatgctgccgctgctcaagcggggaatcggggtgcaccactcaggtctgctgcctatattaaaggaggtggtggagatcctcttccaggaggggctggtcaagtgcctgttcagcacggagacgtttgccatggggctcaacatgcccgcccggacggttgtgttcacggcgctgcgcaagtgggacggggaggagcacaggtggatgggcagcggcgagtacatccagatgagtgggcgccccgggcgccgcggcaaggacgaccctcgggtcccaatcatgatggtggacgaccacatggaccaacccacaatcacgggcatggtccagggcaagggccaacccactgctgttctccttcaagctctcctacctacacccctccttaacctcat

SEQ ID NO: 2183 - DNA, 410 bp, Chlorella vulgaris
aggtcacgacagcagaggagcttgctcgtgaggaggtggatgagctggcaaatgggctggcggacctgctgaagcccggccagacgctggtgctggaggagaaggttgaccctagcatcattggcggcatcgttattgacatcaatgacaagcacgtggacctctccatcctgtcgcgcgtgaagaagctgcagcagatcatccgtgaggctgtctgagcatattgcaccttggctggcagatggccagcagcaaaggcgtggaagggtagttgtttatatcaagagcagtacgaagcaactgactttggccttctcagcagtacgttaagggtcatagtttcatggcagaggcatgttagaggttgccagcacggccagtgccttgtcatggagtcggggtagacacat

SEQ ID NO: 2184 - DNA, 420 bp, Chlorella vulgaris
acggacgcgtgggttgcattgctaggtttgtcttgagcttcgcccgacaaaatgtcgagccaacttgtgtgggagcttgtgaagcacaacaacgcattccttgtgaagggcgtgaacggcaccgtgttcagccgggaggctggtaacctgtataaccgcaactcctacaagtattctggcctggccaacttcaactccactgtggatgttgctgcggctaaggatggcggggtgcaggtgtccaagtcccgtggcaagaacgccagcaagcccagcgctgcccgtgctgtgtctgtaatcaagaagaacgctcgccgcaccaactacgctgtcggcgctgaggcgcagcgcgtgcgccccgacctcaagaaggctgccgttgcccgtgcctccgccgtcaccaagagccagcgtgtgaag

SEQ ID NO: 2185 - DNA, 416 bp, Chlorella vulgaris
cacgcctccatggagtagcggcacccctgccctagacagcttgtggcgtgggctactgggcacatgccaccacctgccgtgttcatcaacgttctaatgacagtgcagtaaacaccgctaggaagggccccgaagccgactacccagtgagaatggcggggacacctgcgcccccccatgtcctgcgggttgagagcatggacgtctaggcatcgccaggaaggctcaggtcgcccttgacgtctccagcagcagacgctgggacggctgtagacgtctccttctcgcttagggagttcctccttttcctgggccccgggctactggtggcagtggctttcatagaccctggaagcctacagtccttcatgccacctggagctcacactggctttgcgctcctctggtggtttgcc

SEQ ID NO: 2186 - DNA, 230 bp, Chlorella vulgaris
caggcccgcgtccgcccacacgtccgggcggcgggacagggctacagggcccgcacgaggtggatgttccaacgccccttccggggcaagggatacattcctctctgcacttacctgaccaactacaacgtcggcgagtatgtggacgtcgagggtcgaggcgcagtgcacaagggcatgccccacaagtactaccatggcaagactggccgcgtgtggaacgtgaccaa

SEQ ID NO: 2187 - DNA, 404 bp, Chlorella vulgaris
acccacgcgtccgcccacgcgtccgagcttgcgtgccgtgactagaggctgcagtgagctgctggcaggcaccaccccccattccaggaggtggtacctttccttggaagggcttcccaccaccccacctgcaccattgtaaatggcctccaaaaaaccaggaaggtccaacacagaccaccaagaaccccctacccaattacctggccttaaacctttatgcgcggcaaccgtgttatacccggcaacatcattgtgcggcaccggggcactgagttccaccctggtgataacgtcggcatgggcagggaccacaccctctttgcgcttgtccccggcacggtgaagttcagctacaaccgccagaaaaagagacggtttgttagcgttgagccgccggaggc

SEQ ID NO: 2188 - DNA, 259 bp, Chlorella vulgaris
gcccacgcgtccgggaaggcattgcatctgctgacgaccgaaacggacatccatgcaaattttctgcaaaacacacaggactcatgtccttgagcttagctccgaggccactgtggcctatcttaatggtgccatcgacgccagccagggcatccccctgcaacgcccatcgtgtgatgttcactggtcgccaactggacgacgaggcctccctgcccgcttgcggcgtctctgaccacatctacgctgtacatcctcg

SEQ ID NO: 2189 - DNA, 267 bp, Chlorella vulgaris
ccgcccacgcgtccgaaaacttcattaaaccgtgtgccggagcaattgattgctggacatcagcatcgcacagccgtcccctgtagcgttttagcccgacacacttcatgcagccttagagggtcggcgagcaagcagcaataatgagacacctgcggtagctgtttagaagccttgggggcggcctgctaagcttgggtttggtggcacctgcagcctatgcactgcacgtgcaggctggcgtggctgctgtggaagcagttgccc

SEQ ID NO: 2190 - DNA, 413 bp, Chlorella vulgaris
cacgaggctagtcagcatgcggacatcagtcgtactggcgttggtggctcctggccccaccttcgctactggccgagccagccttacctccacggcccagagtgcggggttgacctcgcttgtagccgccgtgcagtacgctggctttacaagtacccctgacaacctgaagggtggtaccatcctagcacctgacaatgaggcctttgataaactcttgacaactttaaacgccaaccgggtcactcaactgaacaaacccctggtggctgaggtcctgcaatatcatgtcctaccaacctcaaccaagtcgactgccttcaagaatgacgacgagctcaagcctctgggacccaagggcagcaccctggcagtttcagtttccgggaagactgtgatctttgaaccctcct

SEQ ID NO: 2191 - DNA, 385 bp, Chlorella vulgaris
cctgtacgtgtctcacatccaggtcaacaaggcgcagaaggggcgccgcaggacctaccgcgcacacggccgcatcaacccctacatgtccagcccctgccacattgagctcatcctgaccgagaaggaccaggcagtcaaggccgagctggaggagaagagcgagcgcaagctgagccggcgcgaggccgccaagaagctgcgcagcggcaccacctccaagagcgcttaagcgagagcctggatgccttcaagcagtgctgggcggctgtgtgactccttagtcagcttgggtgcactagccacggcctcttgacatgagtgcagcatgcctgtgaggcagtcccgcttgttccccagtgtatgaggaaaggagggaagctcc

SEQ ID NO: 2192 - DNA, 100 bp, Chlorella vulgaris
ttgcgctgggcggcacctacggcttcctcacgcccgagctctggcgcgagaccgtgttcgccaagtcgccgctgcaggagtttgcgcgcttcacccccca

SEQ ID NO: 2193 - DNA, 422 bp, Chlorella vulgaris
ggcaagcggcggactgaggagtatgccgactgcttcctggaccctgagaagctgcccctggacgtggtcaagaacgccgatgtgctggtgacaggaaccctgggcctggccaccgggcccacagcaggcgccatcaggaaggcggtggaggcagccaaggagggccgcaagtgcacggtcatggtggacgtcaactggcgccccgtcttctggtctgacctggaccaagccaagaaggtggtggaggagtatgtgcatcaagctgatgtggtgaagctgacggacgaggaagcggagtggctgtttggcatcgggagggacgaggcgctgaaccaaccagagaaggtgcttgagaaccttccccatgccaagggtgtcctggtgtcggccggggagaagggctctgcctactctttccgctc

SEQ ID NO: 2194 - DNA, 403 bp, Chlorella vulgaris
tggcactatcgtgtaggagcgacttcaccccgttggtaccctcctactctgaggttgggtgcttgctcaagccccccctttgcactgacgactggaggcttgctaggcccttagagcagacagatggctccgatggtgactgcgactatcgctccttgcccagcaactaggatacagctgtcaaggcgtccggctttgcccacgctacgctgtgcctcccccaaggtcgcaagacaccagagcttggtagtcagggcggagcgtggcagcggcggggggttctggcctggcttcatcgtcggcggcaccatctttggcgtgcttgggtttgtgtttgctccgcagatttccaaggcgctccttggcgaggaccagaagctgaagctgccgcgcttcttggatg

SEQ ID NO: 2195 - DNA, 375 bp, Chlorella vulgaris
cccacgcgtccgggagcaccttacaatggctccttcagggaagaaggatactaaggccgccaaggcggcaaaggccgtcaagaagtcccaatggaagaagactcgcaagccccgctacagcgtggtcttccacaggcccaggacactcatccgctccagggaccccaagtaccctaggcagagcgctccctccctgcccaagatggacgccttcagcgtgatcaaggcccccttgaccaccgagtcggccatgaagaagattgaggacaacaacaccctggtgttcctggtggacgtgcgcgccaacaagaagcagatcaaggacgccgtggcccgcttgtatgacatccagacgcgcaaaatcaacaccctcat

SEQ ID NO: 2196 - DNA, 352 bp, Chlorella vulgaris
gtggaatcccccgtcgacaacaggtccaaggttcacaagatgcagaccctctctgcccgtttcggcgtccgcgcccctgtctcccggggcacccgccaggtgacccgcgcctccgtggagtggtacggccccgaccgcgccaagttcctgggccccttcaccaaccccccttcctacctgaagggtgagttcgctggcgactacggctgggacacctctggcctgtccgccgatcccgagaccttctcccgctacagggaggttgaggtgatccatgcccggtgggccatgcttggcgcccttggctgcgtcgtgcccgagctgctggaccgcaacggcaccgtcaactttg

SEQ ID NO: 2197 - DNA, 393 bp, Chlorella vulgaris
tttagaaagtggtaccgctattagcttgtgatggcggcccgcaccctcctcgttgcggcacttgccgtcgtgctggtcactttcgtggcggcagatggaagcatcgactcggaaatcgaccaccttgagggcgagtgcctagaagagatcaacgagctttgggagaaatatacagagggcccagcggtggagggctgcgacgaggcctgcctacgggagtgctaccagatactccaagacgctgtctggggcaccaagaacaaaaattgccccttgcagtccgagattcagcgttgtttccacgtattttccgatgactgggaggactatgtgaaggagtgcgagcttttcgtcttttcggatagcgagagtgaaggcgagtcatcctccggc

SEQ ID NO: 2198 - DNA, 372 bp, Chlorella vulgaris
agaacacgctcttgtgtaattcagcaccatgactgagggcaaggtccatctgtccatcgtgatttgcggccatgtggactccggcaagtccaccaccaccggccgcctgctgttcgagctgggcggtatccccgagcgtgagcttgagaagctgaaggaagaggcctctgcccttggcaagtcttccttcgcctttgccttctacatggacaggcagaatgaggagcgcgagcgtggtgtgaccattgcctgcaccaccaaggagttcttcaccgacaggtggcactacaccatcatcgacgccccgggccacagggatttcatcaagaacatgatctccggtgccgcccaggccgacgtgttcctgctcat

SEQ ID NO: 2199 - DNA, 388 bp, Chlorella vulgaris
cccacgcgtccgttggaacggagcccaaccctgacgagctggagatggctgagtgcctgggggccccctcccccggtcatgggggcccgccaggtggcagggcacagcaggcgcagcagcagcggcagcaggagccaggtggcggggcaggcggggagggactttcacaggagggctctgtcatgctggagctggcggatgaggaggagcttggctacccaccagcagtgacgcagcaggcgggtcccacagcaggcgcagcagcaggagcgcttgatgtggaaggggcttcagcactggtagcccagcttgctgcagaggaggctgggccgaccattgccagtggcggcgacgttatgggcgcggcgactactgagcaagatgctct

SEQ ID NO: 2200 - DNA, 390 bp, Chlorella vulgaris
ggggccagcagtatcggaggcgctcaccagtcaaacctggcttgccaccccgaccgatgtccatcctcatgaggctcgcggctgccacctctcactttgccggtcagcagctggtggccgcacccaggcggctagccatcaccagcaggcgggcggccagcaccaccaccaatctgaccaagaccgatctgattaaggaagttgcccaggaggccaacatgacgcccaagcaggcgtcatccgctgtcaacatcatgctggagaccatagtgaagagcgtagcgaaaggcgagaaggttgtgatccctggctttggcacctttgagcagcgcacgcgcgcagcccgcagggggcgcaacccaaagacgggcgagtctcttgacctgccgg

SEQ ID NO: 2201 - DNA, 355 bp, Chlorella vulgaris
cccacgcgtccgcccacgcgtccgcggacgcgtgggcccgagccttaggcttgctgacggctccttcgtgctcatccttccccaaccaactgcagcagcgccaacaccatggccgacaacaaggagcctcgcttcctcatctacggtggccgcaagggctggatttccggcctggtgggcgagctgctggaggcccagggtgccacttaccactttggcaaggcccgcattgaggaccgccacgccgtgctagaggacatcaaggagttcaagcccacccacatcctgaacgccgctggtgttactggccgccccaacgtggactggtgcgagacccataaggatgagactatca

SEQ ID NO: 2202 - DNA, 418 bp, Chlorella vulgaris
cccacgcgtccgcccacgcgtccgcccccaggacatcatcgccatctccgcccgcccatatggccagcgcgccgtgctcaagtttgcgcactactctggcgccaaggctaccgtgggccgccacacccccggtaccttcaccaaccagatccagaagggctttgaggagcctcgcctgctgatcaccactgacccgcgcaccgaccaccagtccatcaaggaggccgcctacatgaacatcccagtcatcgccttctgcgacaccgactctgacctgcagggtgtggacgtggcgatccccgccaacaataagggcaagcactccattggcatgctcttctacatgctcacccgcatggtcctgcagatgcgcggcactgtgtcggctgccaacccctgggacgtgatggtcgacatg

SEQ ID NO: 2203 - DNA, 414 bp, Chlorella vulgaris
cccacgcgtccgcggacgcgtgggcggacgcgtgggggaacagctctttgcctcaagagagcttctaatatttttagtgagcggcaggcttgatcaccatgttgcagctgggcctctgtagtacgcacctacgcttgccagcccctgtggccgtcagaagtcccacatgctgtctattgcgagcacagagcgtgcgtggctccccagtaaggctccaacccctgccccagcgtccgcttcatctagccaacgcctctgactcctctggaccccacacatcaccttctgtggacgaagaatccgaggatgaagaaactgatattgtgctacagccagaggaagactgggtggtgcccggcacgatggctgatgctatgaaggccggtactaagcttggcaaggcagtcaactcag

SEQ ID NO: 2204 - DNA, 405 bp, Chlorella vulgaris
cccacgcgtccggttgatagatgcgcaaggaaaggcccgtcgtgcactgctgagctgcctcttcatgtcatcaccgttagatgctagcgcagcagccacacaactaaacaagagcaaccgatacaaagagttgtttcgacgatatggaaagatagctattggggtgcacctcgcggtctatgcctccttcttcgctggtgagtgctggctgagcagctgtgcaggccctaaacgtgatccgactgacttctgtggctgtgctttgtagggtgctatgttgcagtcgagtccaaggtagatgtgcagagcctactgcagcgttacagactgctcccagagaagcaacccgaggatgcggaccctgcaaaccgtacttggcttgaaaaggcggtgactgggccgggg

SEQ ID NO: 2205 - DNA, 321 bp, Chlorella vulgaris
cccacgcgtccgcccacgcgtccgcggacgcatgggccgtcgcgtagggtcttgctacatctgcacatcaacaacgatctgggtttgaacggtatccccaacattaggggcccacatgataccgacaaagttgtgtccatcattccaaaggtgtacttgtggcatgcacatcatgtgcgagccctccttcttcgcttttgactgcagatcaactaccagtacatgcactatgcctcattctacagccttcagaacctctgctttgacttctggtatattacactcgactcgatggtccatttgaaaaacccacaggagtgt

SEQ ID NO: 2206 - DNA, 275 bp, Chlorella vulgaris
  unsure (1)..(275): unsure at all n locations
gttcagttacagcggccaacatgcgcgcgaagtggaagaagaagaggatgaggcgtctgaagaggaagcggccgaggcagagggcaaagttgatggaaaaccccgcctggaagccaaccggctgcaaccttggaggaatcaacaaccagctgccttttccccccaaaatccgagaaggcgccttaagtgtaatctgggcgtttcccaaaaaaaaaaacnaaaaaacctcacaccagggcgctatcctcacagcctccacagcaagcaccccgaag

SEQ ID NO: 2207 - DNA, 395 bp, Chlorella vulgaris
cggacgcgtgggtgcttgcactcccccgtgcactgaggtgaaggatgatgctgtctctcggagctgccacttctttcggtccagcagctcagcgggccaggcagcactgcaggcatcagatcacgctgccgtcggtacggcagcagcgcctccaaccccagtcacagagttggcagcagcgggcagtgcagacaagagcaacagcacccaacattgttgaggtggatgctgccacgctggaggtggaaatcatgaaccgggaccggcctctcattattgacttctttgcaacttggtgcgggccctgcttgttgctggccaaggagcttgaaacagtggccagcaccctgggcgaccgtgtcaagatactgaaaattgacaccgatgagaacccg

SEQ ID NO: 2208 - DNA, 399 bp, Chlorella vulgaris
acaggcttccaaatgacagcatagcagcaccagcacaggtgttcaggcatgctgccagtgtcctctctgaattgaatttttcttagcgaggcccatgtctttcccagctgccacggtgcggcctgtgggttatcatacctgagataagtgcatttgctactgttgccgtcctgttatcaatgcatgctgctgctcctcacctgttggaaggcctgcagggatctcatatgttgcctaccttcctgcgccgcaactgattagcatgcaaaccttacctttttccagtatctacttttggctttcaaggagagcactacacctgctgccactggcacgactgcatgtcggttaagaagtgattgctgacgcacgcgttaaggagtctgaaagtttgtaatg

SEQ ID NO: 2209 - DNA, 355 bp, Chlorella vulgaris
  unsure (1)..(355): unsure at all n locations
cccccaagaagggtggcgtggagtggtacggccccaacaggcccctgttcctgggcccctacagccccgagcccccgagccacctgaagggtgagttcgctggcgactacggctgggacacctccggcctgtccgccgatcccgagaccttctcccgctacagggagattgaggtgatccatgcccgctgggccatgcttggcgcgctgggctgcgtcgtgcccgagctgcttgaccagaccaaccacgtgccctggttcaaggctggcgcccagatctttgcccccgagggcatccagtacctgggtgtggatggcctgatcaatgccaagagcattgntggccacctcattgt

SEQ ID NO: 2210 - DNA, 329 bp, Chlorella vulgaris
  unsure (1)..(329): unsure at all n locations
cagtcatgtctgcacctgtatgtcagcccacggctgtgcaagcccagctgcgaaaaggatgcaggccggcgcacaagggcgcggcgggtgctgtgaagtgcagcagcctgccacagcagcagcagagtagaaggagcgctctccaaggggcancangccttttangtgccgcgctgctatccaaagccgcccccgccctggcgatagaggaggagcacaagctgctgtgtgagccggctgtgctgaggagctacctccaaaggagcgcttgacacggcctctgggctgcagtaccaggaccctgcggttggctccgggcccaaccccct

SEQ ID NO: 2211 - DNA, 420 bp, Chlorella vulgaris
cccacgcgtccgcagacatgttgatgtctgacggaggggacagcccgaaggccgccgaggcccccgccgccgccgcggctcccgcccccggcgagcccatggacatcaacaccgccatccagctggtgctcaagaaggcgctggctcacgacggcctcgcacgcggcctgcacgaggcctgcagggccattgagcgcggccaggcgcagctgtgcatcctcgccgacgactgcaaccagcccgactacaagaagctgattgaggccctgtgcgccgagcagagcgtcaacctcattgccgtgcccgaccccaagaccctgggccagtgggcaggcctgtgcaagattgacagcgagggcgaggcgcgcaaggtggtcggctgctcgtgcgccgtggtcaccgactacggcgaggagactg

SEQ ID NO: 2212 - DNA, 313 bp, Chlorella vulgaris
gatgcttgatgggttacatgaggtcaccgtatgctaaacgcgatttcaatctcaaagactaggagcagcaccacaatgctttcctgttctaacagtaaactaggcggcgacactggcaacgaccgtgtgatcacacgacctcctgttgataattaggagaagtgctgtgaactggatcgactacacgataagtagcacataaagaaaaaaaaacaaggccgtatgaagaacagatgctgcatcagtgcctcattgtatgagccgttgataggaattcagtgctgaggataatgcaaccgcattgaacaataat

SEQ ID NO: 2213 - DNA, 418 bp, Chlorella vulgaris
  unsure (1)..(418): unsure at all n locations
cccacgcgtccggagggtgtgccccacccctacgacaaggtgaagcgtctggtgatccccgatgcgctgcgcgtgctccgcctgcagcacggccacaagtactgcaagctgggagacctgtccgcggcggttggctggcgccaccaggagactgttgccgagctggaggccaagcgcaaggccaagtctgctgccttctacgaggctaagaagaagctgcgtgctctgcgtgccaaggcagagtcccaggtggccggccagtaaagggcacctgctgatgctgctgccagcggcacggctgacaggcagccaccgcacttgagaggcgctggcagtggtgtgtgcggcgagcgaggcttccgggcaagggcagcgtggggtggatgggagcagcgtcncgccgctgcgcggccgctct

SEQ ID NO: 2214 - DNA, 411 bp, Chlorella vulgaris
gcggagaaggacttcaacctgccggagcaccccgagattgagggggtgtccaacctggaggtcatcaagctgatgcagtccatgaagagcaaggacttggtcagcgagcgctatgcctggcgccactactactggttcctgacggacgcgggcatcgagcacctgcgtgagtacctgaacttgcccagcgagattgtgcccgccacactgaagaaatcgaccaggcctctggagcgggagggcgcacgcccgccgcgcggcgacaggccgccccgccgcttcgacggcgagggccgcggcggctaccgctctgccgagggcaagactggtgcccctggcgagtatcgccccgagttccgtggtggctttggccgcggctctgcccctccccagtaagcagccaacaggaca

SEQ ID NO: 2215 - DNA, 415 bp, Chlorella vulgaris
gtccaagccccttcagcaaaagatccacgatgcagaccgcctttgtccgctccggcctccgtgccgccgtccccaccgctggcaagggcacccgccaggtgacccgcgcctctgtggagtggtacggccctgaccgcgccaagttcctgggtcccttcaccaaccccccctcttacctgaagggtgagttcgctggcgactacggctgggacacctctggcctgtccgctgatcccgagaccttctcccgctacagggaggttgaggtgatccatgcccggtgggccatgcttggcgccctgggctgcgtcgtgcccgagctgctggaccgcaacggcaccgtcaactttggcgagaacgccgtgtggttcaaggctggtgccgccatctttggtgatgacgggctcaactacct

SEQ ID NO: 2216 - DNA, 362 bp, Chlorella vulgaris
gttgctcggtgcgcgtctcggccttcaaaccactcagaatgcagaccgcccttgccaccagcttcgccaaggcccctgtggccacccgcaccgctggtgccaggcccgcacgcaccgttgccgtggtgtgccgcgcgcagcagcagcagaaggccgcagcagccctggccgccgtgcccgccctgctggccgcaagccctgcctttgctctggttgatgaccgcattgccactgagggcactggcctggctctcggcgtccacgaccccgccctgttctttgccattgctattgtcttcaccggtgtgtgggcagtgttctactctggggccaagagcctgggcggcggcaagggcgatgac

SEQ ID NO: 2217 - DNA, 370 bp, Chlorella vulgaris
cggacgcgtgggcgcgtctgctgggccccggcctgaacaaggcgggcaagttccccaccctcatcacccaccaggactctgtggagaacaaggccaccgagatccgcagcagcgtgaagtaccagctgaagaaggtgctgtgcctgggcgtggccgtcggcaacgtcagcatggctgagcgcgagctctacatcaacatccagatgagcatcaatttcctggtgtccctgctgaagaagaactggcagaacgttaagtccctctacatcaagtccaccatgggcaagccgtaccgcctgtactgagcggcgctggcagcgctgggcctgctacgccgtgctggcagcgcgccctgcgcgtcgggcttgtg

SEQ ID NO: 2218 - DNA, 391 bp, Chlorella vulgaris
  unsure (1)..(391): unsure at all n locations
ccttgagcttagctccgaggccactgtggccgatgtcaaggctgccatcgaggccagccagggcatcccctgcgatgcgcagcgtgtgatgttctctggtcgccagctggaggaggaggcctccctggccgcctgcggcgtgtctgacgacagccagctgtacatcctgatgcgcctgctgggtggtgccaagaagcgcaagaagaagacctacaccaagcccaagaagcagaagcacaagcacaagaagatcaagctcagggtgctcaagttctacaaggtanacgacagcggcaaggtgcagcgcctgcgcaaggtttgcccccagtgcggccccggcatcttcatggccacgcacttcaaccgcgtgtactgcggcaagtgccacctc

SEQ ID NO: 2219 - DNA, 321 bp, Chlorella vulgaris
ggcaagcgaacaaccatggcgccaaaggagcagaagtccaaggaggccaaggccatggctgcggccaatgccagcaagggcaagaagaagaagtggtcaaagggcaagatgaagaagaagaggatgaggcgtctgaagaggaagcggcggaggcagagggcaaagtgattgcacagccccgcctgcaagccagcggcctgcagccttggaggatgcagcagccagctgcgtgtgcgcccgatagtctgacagcgctctttaatgtaacatctgcgcgtcaaaaaaaaaaaaaaaaaaaaaaaaaaaaaaaggggagggcgc

SEQ ID NO: 2220 - DNA, 387 bp, Chlorella vulgaris
gatccggcaaggaagcaagatgccgatccagggcgggcacaagtaccaccagtatcaggtggtgggacgccaccttcccacggagagggagccggagcctaccgtgtaccgcatgaagctctgggccagcgaccctgtcagggccaagagcaagttctggtacttcctgaggaagctgcgccgggtcaagaaggccaatggccagatcctggcatgcaacgagatctttgagaagcaccctaccacggtgaagaactacggcatctgggtgcggtaccagtcgcggactgggtaccacaatgcgtacaaggagtaccgcgacaccaccctcaacggcgccgtgtcgcagctgtatcaggagatggcctcccgccaccgggtgcgcca

SEQ ID NO: 2221 - DNA, 382 bp, Chlorella vulgaris
cccacgcgtccgcccacgcgtccgcccacgcgtccgcccacgcgtccgggctttgaccccctgaacctgggcgcgaaccccaaggcccttgagcggtatgtgcaggctgagctgcagaatggccgctgggccatgcttggcgtggcaggcatgatcttccccgagctgctcacccgcgccggcatcttcactgcccccaactggtacgaggcgggcaaggtgtctgctgagagcggcgccatccccattgccacccagctgatgatcatcgtcttcagcttccactttgtggagaccaagcgcggcatggactatgagaagccaggcagccaggcagagccaggctccttcctgggctttgaagccgcgttcaagggcactg

SEQ ID NO: 2222 - DNA, 389 bp, Chlorella vulgaris
ggtaccttcaccaaccagatccagaagggctttgaggagcctcgcctgctgatcaccactgacccgcgcaccgaccaccagtccatcaaggaggccgcctacatgaacatcccagtcatcgccttctgcgacaccgactctgacctgcagggtgtggacgtggcgatccccgccaacaataagggcaagcactccattggcatgctcttctacatgctcacccgcatggtcctgcagatgcgcggcactgtgtcggctgccaacccctgggacgtgatggtcgacatgttcttctaccgcgagccggaggaggccaaggaggagggagccgcggaggaggcacccgccgtggagtacgcgcccgataccggcttccaggcagcgctgcc

SEQ ID NO: 2223 - DNA, 277 bp, Chlorella vulgaris
cttcgcccgcgtgtacggcaattgagcacttggctgccttgtgctggaaagcagcatccggagcagcagggccgatgcggctgtctgtaacaatgtagtgtggggcttgcaacctttgcttggcccggcgtgaacggttgcttgttcgtgggtgggagcaccgcttgtaggcagacactgagaagaatgaaagaagtctaccaattttatatttgttgctttttgctagggtatcgggcatggcatagctaaccagctgtatgtaacggctgtttgc

SEQ ID NO: 2224 - DNA, 401 bp, Chlorella vulgaris
ctgaggcaatccgggaatcgagttggccttgagccaacgcgtttgacgcccgcagcagcacctaagacacgcaccaggcaccatgctcatctcgaaaaagaacaggcgtgaggtgtacaaattcctcttcaaggagggtgtgctgtacacggagaaggacttcaacctgccggagcaccccgagattgagggggtgtccaacctggaggtcatcatgctgatgcagtccatgaagagcaaggacttggtcagcgagcgctatgcctggcgccactactactggttcctgacagacgcgggcatcgagcacctgcgtgagtacctgaacttgccaagctagattgtgcccgccacactgaagaaatcgaccaggcctctggagcgggagggcgcacgcccgc

SEQ ID NO: 2225 - DNA, 411 bp, Chlorella vulgaris
cccacgcgtccgcgtccccgtgcttggctgggttgcctttaacattgctcagccctttttcaaccagctgagcgctatggatgagcagaagcaggggggctctggcaagaggaagaggagtgtagctgtgggcctgggcctgggtctgggtgctgccgccctgctgggtgctggccaggctgatgccgccaccgaggccatgcagctggctgctggcgacggccgtggctctgtcatcgccctgctctttgttcctgctcttggctgggtggcctacaacattgggcagccattcttgaaccagctggacgccatgaacaaggactaggtgcttagttccaggcacgaatgtcgaatcagctgttcagggctcttgaggagtggacccttgcagcgtttgtttcactaagc

SEQ ID NO: 2226 - DNA, 386 bp, Chlorella vulgaris
accgccgccaacccctgcatcggcaaggtcttcaccgtggagatgcaccacaagcgcgtggacaaggccggacccggcgacaatgttggcatgaacgtcaagggcctggacaagggcaacatgccccgcactggtgacgtgatgatcctcaagtctgacggcaccctgaagcccgtgaaggacttcaccgcccagatccagaccctggacatccccggcgaggtcaaggcgggctactcccccatcggctttgtgcggtgtggccgcgccgcctgcaggatttccaagatcaactggaaggttggcaaggagactggtggcaagaagctggaagagccccacgggctcaaggccaacgagatggccgaggttgtgtttgagccctg

SEQ ID NO: 2227 - DNA, 376 bp, Chlorella vulgaris
aaaaaaaaaaaaaaaaaaaaaaaaaaaaaaaaaaaaaataaaaaaaaaaaaaaaaaaaaaaaaaaaaagaaaaaaaaaaaaaaaaataaaataaaaataaaataaagagatataaaaggattaaaataaaaaaaaataaaaaaataaggggggggcccctcaaagggttccctgtttcttttcctttgattccactttcagactcccttctaggtttcccttaatttcattttaaggggcttttttttaaaatctcctttgtgggaaatccccgggtttcccccaatttatccccttttaaaaaatcccctttttcccaatttggttatacacaaagggggcccccacttttcccctttccaaaatttttcccccc

SEQ ID NO: 2228 - DNA, 401 bp, Chlorella vulgaris
gctggccaagcagtatgccgccttcctgtcctctgacagcgtgatcaagcagatcccgcgtctgctgggccccggcctgaacaaggcgggcaagttccccaccctcatcacccaccaggactctgtggagaacaaggccaccgagatccgcagcagcgtgaagtaccagctgaagaaggtgctgtgcctgggcgtggccgtcggcaacgtcagcatggctgagcgcgagctctacatcaacatccagatgagcatcaatttcctggtgtccctgctgaagaagaactggcagaacgttaagtccctctacatcaagtccaccatgggcaagccgtaccgcctgtactgagcggcgctggcagcgctgggcctgctacgccgtgctggcagcgcgccctgcg

SEQ ID NO: 2229 - DNA, 365 bp, Chlorella vulgaris
gtgagaaatgagctggactgacagggctggatgcaggatgtgcctgagtcttgcatgagcatttgctcacacagctgcgggggtagcaggcaccagcaggagtttgcagggcttcccagggctcctggggtttggcttgtctttagttagggtggcaggcagtgcgatcaaagaggaggtatgatgatactgggctgacaggctctatgcagttatgctttgtgtcttgatcgtgccaactagctaagctggatcctgtcagtgatgctgggcctgaggactgtctgttcggccggcaaacccggtactcttagtagtgtagcagttgttggcctaactggcggtctgcgaggccagcagccaag

SEQ ID NO: 2230 - DNA, 397 bp, Chlorella vulgaris
ctctggcgaaatatcaggcaaccaaaaaggcagcgcttagcgaagggcccacgatggggcacagtatataaaacagtcactgcatcatggattggaccatgattcaggagtgcatcccagtatgtatcgcaatcagggtaggcagctgacaagccgggagcaatgtaggcaccagtggttcctcacggtgctttcaattttcagttgaggtctgtgtcgagcacgatttcgtgcacctgtgcttgaaactgatcagtgtactaagcagtttgttatgcatcagatcattcattatcccactgatttgcggtatttattcgagtcgtgtcacttgtcatttgtaggtccaatcttgcgcatcaacttgttgatccatgtgaagatcctgcttgttgcc

SEQ ID NO: 2231 - DNA, 304 bp, Chlorella vulgaris
agctctggcgtaagatctggcaaccaaacaggcagcgcttagcgaagggccccccatgggggacagtatataaaacagtcactgcatcatggattggaccattattcaggagtgcatcccagtatgtatcgcaatcagggtaggcagctgacttgcgaggagcaatgtaggcaccggtggttcctcacggtgcttgtaattgtcagttgaggtctgtgtcgggcacgatttcgtgcacctgtgctggcaactgttctgtgtactacgcagttgggtatgcatctgatcagtcattataccgctg

SEQ ID NO: 2232 - DNA, 419 bp, Chlorella vulgaris
cggacgcgtgggtggctctgggcctggcccgcaacatggggcgcatcctgggcccagcagcagaggagcaggaagcggaccagctgcggttggcggtggcggacgccatctgccgcacggccaagcggcgcaatgagttcagccccgccgtcatcgcgatcgaggcggagaccaagctcacagactactgccgccgcatcgtgcagcccaacttctgggggggcgaggccgagctgctggtgctgagccagatgctgcgggtgcccgtgtttgtctacctcaccagcagcgacgccaagggagggccggccggctttgtggcgatccagaagtacggcgagaagtttggcaaggcaggcaaggactggcagcggcggcgccccgtgcgcctgctgtacaccggtggcaaccattacgac

SEQ ID NO: 2233 - DNA, 374 bp, Chlorella vulgaris
ggagcgtggagtgggccaggcgaagctgttgcagcacaaggagaacaagcggacccgattcctgttccggcaagaaaagacgctgaagatcagggcaaaccacatagtgatgccaggcagcaaggtgcaggagcacggcggcagcgacaaggccatggtgtggagctgcgtggactttgcggacgaggagcagcgcatggagatgttctgcatacgctttgccaacgcagagcgggcgcagcagttcaaggagtcgtatgagggcgctgctgccaagaatgagccgttgttgaaggaggtgaccacagcagaggaatctgccacagacaaggctgccgatgagctggctggcgaggtggagaagaaagcgacag

SEQ ID NO: 2234 - DNA, 414 bp, Chlorella vulgaris
gtgacaggtaatgcgggtcagagagggggtgtgggcatactgggctgccagagctgtatgcagttattctctgttacttgttgtatagggtccatcctgctggttgaggctgcaccatccccttcactttcacaaggaggctgatagggggatgaaatttggcagtcagcagacagagctggagcaatgcaagtgatgcctctagtcttgtagaccgccctgtgcctgggctgtcgcttgtgccaaccgcacctcgctggcgcaccctggggaggcgccttggtgccccgccgggattctgttgcattcatgcgtgttttatttgtgggggctgtaaaatccaggagagggagcatattgggtgcgccatgggtagtgtgcttcgctgtatggatcctagctagctgcacccgg

SEQ ID NO: 2235 - DNA, 409 bp, Chlorella vulgaris
ggcaacaacacgtacaaggcagtgcagcagtccacgggcgccatcgccatcggtccgctgatgcagggactaacccgccccgtcaacgacctgtctcgtggctgcacagtggccgacatagtcaacaccgtggcttgcaccgccgtccaggctatcggcaagaaaagaagcatgtccgtggacccagtggccactgccgcttaaccagcgactcgtctatgactatgcgcccactgctggctgcggcatgtgggaggagcttttggcgggacgtcatacccctggcagcggcatctgttggcgttgttggcgctagtggctccctgttcaggcgatgattttggagaagcgcagagactggtattgcagtggaaggcagtgctccagttttgggtacctagtgggttac

SEQ ID NO: 2236 - DNA, 411 bp, Chlorella vulgaris
cccacgcgtccgcccacgcgtccgctggaaggcagcttgcactgcctttggagcggcactgttccacgtgtgaaagcgtgcaaagcatgacatgtacacggtggctcctcaaccgtggctactggttgatgcctgcgcttgtgccatgatgctgaatggacctgttctggcctcccactatgcttatgggtagccagccatatgcagctgcagccatggttggagccttcctagcgacagggcggggatgcccctcagtgaggcaagcgagttgtgcgtgctgcatccatttaaccactgatgggttgcatgctgggactgtttggctatccgcaatgtaacaggaaggggtcagacagcaatttacaacttgcatgcagccatgtaaactcatacttggcacaacagcta

SEQ ID NO: 2237 - DNA, 401 bp, Chlorella vulgaris
cccacgcgtccgcccacgcgtccggaaggcactgcatctgctgaggaccgaaacggacaaccatgcagattttctgcaaaacagacaggactcatgtccttgaacttagctccgaggccactgtggccgatgtcaaagctgccatcgaggccagccaaggcatcccctgctaaacccagcattttatgttcccctggtcccaacctggatgaggaaggcccccctgcccgcttccggcgtgtctgacgacagccagctgtacatcctgatccgcctgctgggtggtgccaagaaccgcatgaagaagacctacaccaagcccaagaagcagaagcacaagcacaagaagatcaagctcagggtgctcaagttctacaaggtagacgacagcggcaaggtgc

SEQ ID NO: 2238 - DNA, 362 bp, Chlorella vulgaris
cccacgcgtccgcccacgcgtccgcccacgcgtccggttcaggaagaacctgccacccagctccctgggcgccaaggttcgcgtcatgctctaccccagccgtatctagtggactgaagcggcgccgccagctggcgggcagcatgcacggcagcagtggcgatgcgcggcagctgtgccggagcaaactggagtgagggacgggccccgcgcactggcaggggcaggtgcttcggtgggctgtagcaagctcagcacagcacagcatggcgcagcagccgtgctatgtgtggtgactgtgcatggagcggggacaggagctggggctggccggctgtgccacggtggcacaggcgcagctg

SEQ ID NO: 2239 - DNA, 223 bp, Chlorella vulgaris
ccacgcgtcaaggaacgcgtccgcccacacgtccgcccagtcgtccagttgatgaagaacctgccacgcatccagctgcgcgctcaggttcccgtcatggtctcaccaacccatatcgagtggccaggaaccacggtgcaagctcacgggcgccatgaacgggaccagtggtgatccccggtagactttgcggaccataatcacctcacggacaggtcccgca

SEQ ID NO: 2240 - DNA, 390 bp, Chlorella vulgaris
accgtacggactctacgaatatcatgcagtgcgccatgtctctggcatgtgtccgccccactcgcgtgtttgcggccaagcccgtcaagggtcgtgtcgctcgggggatgactgtgcaggcttacaaggtgaccctgaagacccctagtggcacctccgagatcgagtgcgacgagaacacctatgtcttggatgcggcggagagcgcaggacttgacctgccctactcgtgccgtgcgggtgcctgctcttcctgcgccggcaagattgaggctggcgaggttgaccagagcgacggcaacttccttgaggacgagcagctggagaagggctttgtgctgacctgcgtggcctaccccaagggtgacctgaccatcaccacccaccaag

SEQ ID NO: 2241 - DNA, 402 bp, Chlorella vulgaris
gcgagtatcggcatttggtactggggtacatatttgacagcgccccggggttcatggatgtgaatgcggccaggctggtgctgactaccacgatgtcaccggggctgaagcgtactgcagctttggctgcccatagtgtgctgtccttcttccagcccatagatggagcacgggggaaggagtattgggacaacatgctgcggctggggcaggacaagcctcagctgtacctctacagccaggacgacccgctgtgccacgcagacaggctgacgaaactgctggaggcaaaaaagcagaggggccagagagtgacttccatcaagtgggagaaatccgagcatgtgactcacttcaagctgcaccggcaggagtacctagctgctttagtgccgttcttgc

SEQ ID NO: 2242 - DNA, 347 bp, Chlorella vulgaris
aaaaaaaaaaaaaaaaaaaaaaaaaaaaaaaaaaaaaaaaaaaaaaaaaaaaaaaaaaaaaaaaaaaaaaaaaaaaaaaaaaaaaaaaaaaaaaaaaaaaagaaaaagaaacaaaaatgaaaaaaactaaaaaaaacaaaaataaaagggggggcccccccaagggtttccgcctttttttcccttgctggccgttttttacccccttcaagtgtgcccccaattttattttcgggggcttttttttaaaaccttctcatggggaaacccccgggttttcccaattttaccccttttgaaaaaatccccctttccaaaagtgggttttttccaatggggccccgccc

SEQ ID NO: 2243 - DNA, 419 bp, Chlorella vulgaris
cgagacgctcgccccttctcggaagcaggtcaccaccatgcagaccgccaccatgcagaagtccttcgtgggcaccagcgtgaaggcccaggccccccgtgcccgccagaacatgagcaccgtggtggtggcttcctccggcaagaagattgacctgaacaagcagggcatcaactctgtcgagaaccccattgtcaagctgaacctgcgcggcgagagcaagagcatgcagagcaaggactgggtggacccccagggccgcaagggcaagggctttggcgtctaccggtttgccaacaagtatggtgccaacgtggatggctactcccccatctacacccctgacacctggtccgagtctggtgacagctacaagcttggcaccaagggcctcattgcctgggctggcctcattgttg

SEQ ID NO: 2244 - DNA, 403 bp, Chlorella vulgaris
cgtcggagcggctggcaacatggcgaccgagattaagttgttcggcaagtggagcttcgatgaggtggaggtgaacgacatctcccttgaggactacattgccgtgaagcccaagtatgcgcgcttcaccccccactctgccggccgtttccagaagcgccgcttcaggaaggcgcagtgccccattgtcgagaggctgaccaactctctgatgatgcacgggcgcaacaacggcaagaagctgatggcggtacgcatcgtcaagcacacctttgacatcatcaacctgctcaccgaccagaaccccatccaggtcctggtggacgccatcatcaacggtggtccgcgtgaggatgccacccgcattggctccgccggtgtggtgccccccaggctgttgatg

SEQ ID NO: 2245 - DNA, 419 bp, Chlorella vulgaris
tgcaaccttgccccgaaggaaaggaaggtggtgggagtgccttggaagggggtccttgtcgaacacccatccacaagtcatggttcgcccaaaaaccttcaaggaggagcatcccctggagaaacggcaagcggaggcagccaggattcgcgagaagtaccctgataggataccggtcattgtggaaaaggctgagaagagcgacatcccagacatagacaagaagaagtatcttgtccctgctgaccttaccgtcgggcagttcgtgtatgtgatcagaaagcgaatcagggtctcgccagagaaggccatttttatgtttgtgcgcaacgtgctgccgcccactgccgcgctgatggccgatgtgtatgctgaccataaggatgaggatggcttcctgtacattacgtatagcgggg

SEQ ID NO: 2246 - DNA, 419 bp, Chlorella vulgaris
cccacgcgtccgcggacgcgtgggcggacgcgtgggaatagggatcatatcggcacgaaccgtcaacatgccgaagacggtcgtggttgattgccggggccatatgcttggccggctggcgagcatcctcgccaagcagctgctcagcgggcagaatgttgtctgcgtgcgctgcgaggagatcaacatctctggcggcatggtcaggcagaaaatgaagtatgagcgcttcctgaacaagcgcatggttaccaaccccaggagggctgcctacaagttcagggcacccgcccgcatcctgtggaggactgtccgcggcatgatccctcacaagaccccccgcggcgcagcagccctggaccgcctcaaggcctttgagggtgtgccccacccctacgacaaggtgaagcgtctggtga

SEQ ID NO: 2247 - DNA, 384 bp, Chlorella vulgaris
  unsure (1)..(384): unsure at all n locations
accttaaacacgattggttatggactgtgtggtgctgggagccagttgagtttactcctcctgtgtgcactggggctccctaatcccaatccccatgtgcactggttggaccggttttgggaatttcccgtccgaaaaccaatgcaccccagccccagatcgaaccccggccgatatactagctgggcggcttggagttaaggcgcccaagttgaggattcaagcctccatatccatgaaagcgaaggctancgagccatgtgatgaaggggtggcggccagctagcagcgctcgagtggtgcatgccattaaaccggtcactgtcagtgtgtcaatcctagctgtgatttcaagacccaaggtcgttccattgtggtgggaat

SEQ ID NO: 2248 - DNA, 367 bp, Chlorella vulgaris
cggacgcgtgggcggacgcatgggtgaaacatggcacccaagaagaaggttgcggcccctcctgccgcggtcaggaaggccgctcagccggccaagcccgtgaaccccctgtatgataagaggcctaagaccttcggtatcggtggtgccctgccaaccaagaccgaccttcaccgctttgtgaagtggcccaagtatgtgcgcatccacatgcagaatcgtgtgctcaaccagcgtctcaaggtgccccccgcactgaaccgcttcacccgcacgctggacaagaacatggcccgaagcctgttcaagctgctgctcaagtaccgccccgagtgaaacgtagccaagaatccacggctgctggctg

SEQ ID NO: 2249 - DNA, 412 bp, Chlorella vulgaris
cccctgtaagctacagtttgagggagcatcaccatgcccgcgggacagggctacagggcccgcacgaggtatatgttccaacgccccttccggggcaagggatacattcctctctccacttacctgaccaactacaaagtcggcgagtatgtggacgtcaaggttaacggcgcagtgcacaagggcatgccccacaagtactaccatggcaagactggccgcgtgtggaacgtgaccaagcgggcagttggcgttgagatcagcaagaaggtgaacgggcggatcatcaacaagcgcatccacgtgcgcattgagcacgtgaggcccagccgctgccgcgaggagttcctgcaaaggtgcaaggagaacgatgccaagaagcacgccgccaaagtggcaagcgaaccccacc

SEQ ID NO: 2250 - DNA, 394 bp, Chlorella vulgaris
gttgttgccatccacaacccgggtttccagggtgtcgtcatggcgcagctcagcaactcgcagctaccggctttgtggcgggctgcggaagcctcaatgccgtctactggggctcttgacacatactagtgccagcaccagcgacgttcagccagtaaaacctgcggcaggcgaccaagcactcagtcttcccagcgccctggatgacatccctccagccaagctaaaggagcttaggcgactaggcctggagatgaaggacagaataaggatggggcggcggggggtggcagagggctttgtgagccagatatacatgcggtggaacaccatcgaggtggccaagctgtattgcaagggaaagcacgcgaccaacatgaagctgctgacagag

SEQ ID NO: 2251 - DNA, 378 bp, Chlorella vulgaris
aatcccccgtcgacaacaggtccaaggttcacaagatgcagaccctctctgcccgtttcggcgtccgcgcccctgtctcccggggcacccgccaggtgacccgcgcctccgtggagtggtacggccccgaccgcgccaagttcctgggccccttcaccaaccccccttcctacctgaagggtgagttcgctggcgactacggctgggacacctctggcctgtccgccgatcccgaaaccttctcccgctacagggaggttgaggtgatccatgcccggtgggccatgcttggcgcccttggctgcgtcgtgcccgagctgctggaccgcaacggcaccgtcaactttggcgagaacgccgtgtggttcaaggccggtg

SEQ ID NO: 2252 - DNA, 402 bp, Chlorella vulgaris
  unsure (1)..(402): unsure at all n locations
ctccctagggctgggcggcctgaacattgatgttaagtcatggtttgagggccaggatgaggagttggatgccaagatgtctggtgttcttgtggccaggctgttgcaggccttccatgaatgcgcaggcgagccgctggatgatgaggacgacgacagcttctggcgcttacagggcttcctgcctggcgggctggtggatgcgctggaccacgacctgctgcagcgcctcgtcaggtcctacaccctgctgcccttctccggcgtgtagggctggataaggaaaggccagtgcacccctgcagcagcgcttcatcaggttctgcaccctagcccttctccggggtgtagggtgtgataaggaagggccagtgcaccaganagcggaagaagccggttgtg

SEQ ID NO: 2253 - DNA, 401 bp, Chlorella vulgaris
cgagatgagtgacaccatcgccatcaccaagggccacggcactgagggtgtggtgacccgctggggtgtgtcccgcctgccgcgcaagacccatcgtggtctgcgcaaggtcgcctgcatcggcgcctggcacccggcccgcgtgtcctggaccgtggcccgcgctggtgccatgggttacaaccaccgcacggagatgaacaagaaggtgtaccgcgtgggcgtgaagggcgacgccagccacaaggccaccaccgagtttgatgtgaccgacaaggacatcacgcccatgggcggcttcccccactacggcgaggtcaaggaggactacatcatgatcaagggtgcgtgccccggcaccaagaagcgcgtgatcaccctgcgcaagaccctgttccccc

SEQ ID NO: 2254 - DNA, 402 bp, Chlorella vulgaris
cccacgcgtccgcccacgcgtccgcaagctcggcggtgctctgatgccggcctggttcgataacccacccacgcaactggttctaccagggcaagtggtggtgccggatggcatcctagacagccgcagatacatagaggagctactacagcatctggcgcgcgagggcatcccaagcagccgcgtcgttgttgccggcttttcacaaggggcctccatggccctcctcatgctccggtcagagcgccagctggcgggtgtggcagccctgagcggctacctgcccatgcagcacgaacccatcctctcaggggtgaacaagtcaactccagtgctcctctgtcatgggactgcggaccgcatgaacccctatgagctggcgcagcaggctgcagcgcgact

SEQ ID NO: 2255 - DNA, 421 bp, Chlorella vulgaris
ccgcaacaagtggaggtttgagttgggtactggatgccaatacctcagcgacgactcagagatgtgcggttggggcaacggggagcagcagttttacacggcgaacactaccaacgccagggtgaacaatggggtactagttatagaggcacgcaaggaggccagcgggcggttgacttcagcgcggcttaagacacaaggactctacgccatccagcctagcagccagtggaagaccatcaaagtagaggcaagaattttcctcccacaaggccaggggctgtggccagcgttctggatgttgccggcgggcaacgagtaccagctaggggccgggacgtacggtcgctgggctttgtcaggggagattgatatcatggagtcagccaatgacatggcagagctgcacggcaccgtccac

SEQ ID NO: 2256 - DNA, 415 bp, Chlorella vulgaris
cccacgcgtccggcagacgacgtttgtaggcccatctgtagcggcagccaggcacgatggtgcagattggcaagaaggctgctagcggccctaagaagggcaagaaggccctgaccttcaccatcgactgctccaagcctgtggaggacaagattatggagattgcctccttcgagaagttcctccttgacaagatcaaggttgagggcaagacaggcatcctgggtgacaacgtcaaggttgtgcgcgagaagaccaagatcacggtgaccagcgagattgccatgagcaagcgctacctcaagtacctcaccaagaagtacctgaagaagcacaacgtgcgtgactggctgcgtgtgattgcgtccaacaaggaccgcaatgtatacgagctgcgctacttcaacatctccga

SEQ ID NO: 2257 - DNA, 414 bp, Chlorella vulgaris
gccgtactccctgtagcatccatggatggggatcccgtgatgttgtccctcattggcaataacatctttacccatagggggaattcgaaccagaccaaccacacctccctgctcaagatcagctgcgtcaagtcagccgctaagagtaaagtctaccttggttacgaagattgccttcatctacagcgccagttaacctaagaaggacagcctttaacccgtgctccggggcactgtcaaccatgaccacgatagcaccgaaactgtccgcccaaagtgcacgaaaaagctgccacacaacgcactgggcgctacggtacgcgtcatgcactaacccaaccgtatctactgtgctgacccagttccgtcaccaggtgggcagcatgcacagcatcagtagccatgccgggcagc

SEQ ID NO: 2258 - DNA, 384 bp, Chlorella vulgaris
cccacgcgtccgcccacgcgtccgcttgtgcggtctgtaaggcgcattgccagaagccagcgtccgccgggcaaaacaagccaccatgaggaacgacgctggcgagattgtggatctgtacatcccacgcaagtgctcgtggaccaacaagctcatcacggccaaggaccacgccagcgtgcaggtcaatattggccacctggatgagaatggcgtgtacactggcagcttcagcacctttgccctgtgcggccaggtccgctccaagggtgaggctgatgccgctatggacctgctctggcagaagaagaaggctgagattggccagcagtgattggagcttgagcgcgggcagcacgctgctgtgcacgctgtgatgccctc

SEQ ID NO: 2259 - DNA, 373 bp, Chlorella vulgaris
cccacgcgtccgcggcgcgtgggctcgatggtggcatccaggaacagtaacacttgggaggcggattgccagctttgacagtgagcagccaagctggcagcatatggtgcgggagggaggccttggtcggggtccatggttggccctcgaatggccaagccggtggttggcccttcaacggtcaaggcagccttgggtgcaccgtgcccaacagtctgtgatgcggcctctactctgaccggaggttgcggcatgtggcgaggacgtggggtgaaaccttgaggcgtcgctgcgggtgtcacggtatgctagggggctttcctgagcaattgataacaagaggaacggcgtggaaacgtcattagtatagtga

SEQ ID NO: 2260 - DNA, 400 bp, Chlorella vulgaris
  unsure (1)..(400): unsure at all n locations
ggtgactacggctgggacaccgccggcctgtccgccgaccccgagaccttcaagcgctaccgccagattgaggtcatccatgcccgctgggccatgcttggcgccctgggctgcatcttgcccgaggtcctgcagaggtacagcggcatcgagttcggcgaggctgtgtggttcaaggctggcgctcagatcttctctgacgacggcctgaactacctgggcaaccctgccctcatccacgcccagtccatcattgccnacctcatcagccaggtggtgctgatgggcgccgttgatggctaccgcaccaacggcggctgctgggagtgggccgagggcctggacaacctgtaccccggcggcgactactttgaccccctgggcctggccgacgaacccg

SEQ ID NO: 2261 - DNA, 404 bp, Chlorella vulgaris
cccacgcgtccgcccacgcgtccgcggacgcgtggggttgatttggaagtgagagcctgaccctcttgcctccttttcaccatggcctctgcgttgattgccaagcccactgtggcccgcgtcttccagagccgtgcgtccaccgtgcgagccaggagcagcgtgaaggttgcagccgctgagaggcagctgtggctccccggcgcggacgcccctgcccacctgaagggtgacctggccggcgacaggggctttgatcctcttaaccttggaaccgaccccgagcgcctcgcatggtacgcggagggtgagaggatcaacggccgctgggccatggctgccgtggccggtatcctggcccaggacctgctgggcaagggcaactggttcgaggccggctccca

SEQ ID NO: 2262 - DNA, 377 bp, Chlorella vulgaris
  unsure (1)..(377): unsure at all n locations
cccacgcgtccgcccacgcgtccgcccacgcgtccgcggacgcgtgggtccggcaaggaagcaagatgccgatccagggcgggcacaagtaccaccagtatcaggtggtgggacgccaccttcccacggagagggagccggagcctaccgtgtaccgcatgaagctctgggccagcgaccctgtcagggccaagagcaagttctggtacttcctgaggaagctgcgccgggtcaagaaggccaatggccagatcctggcatgcaacgagatctttgagaagcaccctaccacggtgaataactacggcatctgggtgcggtaccagtcgcggactgggtancacaatgcgtacaaggagtaccgcgacaccaccctc

SEQ ID NO: 2263 - DNA, 376 bp, Chlorella vulgaris
gcccggggtgctggaggtgtgatcccgcccaacgctgatcttcagttcgacgtggagcttatcaagatcacctgagcaatgccagagcaatgcaccccattggctcacagctagtgctgcaagagccgacactttgctgcacctgggtgctcgctgattttgttagtttccagcaagcgagcgtgtaactgtgcaaaagggaaaaaaaatccaaaggaaacagaacagggtaaaaaaaagaaaatggcaaaatcctgaaaagcaacaaaaatctttgaaaagcaccctaccatgggttaataactaccagatctgggtgcggtaccaatcacggactgggtaacaaaagggggtgccccgcctaaggttaaaccat

SEQ ID NO: 2264 - DNA, 417 bp, Chlorella vulgaris
gcatacgcaggcacagcgttggactatgtctggccctacttgctgcggtaccccccagatgagattggtatcatcgacgctgtgtgcgtgtctcatattgactggggtgcaatccgccaaatggtactgccgaggtacccaacttgggccccctacggggcggaggaggaagagctgcggcgctttgcagagtggggctattatgcctcatccgtctcctccctgacagggtcccagctgtatgacgaaaggatgcctttccccacgcgctttgtccaagtgctgggcgcggtcccagaccggtcgtacgcacccccacggcgcagctctggccgctgcgacgcgttgttgggagctgtgtttggagtgtctgccttctgcacagccctgtggtggcatagaaagcagcgcaaagtc

SEQ ID NO: 2265 - DNA, 359 bp, Chlorella vulgaris
cggacgcgtggggagaaccgacattgatctttcaaggattcaacactgaccttgggttgacaccatgaacaccggaacgctcgaggcgatggggcagctcccgcaggagcaacaacagcaattgatgcaggccatcgagtccatgcaggttagggatagccttagaatgtacaatagccttgtagagcgatgtttcaaagactgcatcgaaaacttccggcggaaggacctggatgctgcagaggagaagtgtgtcactcggtgctgtgagaagttcatgaagcacatcgctctactcgggacatgctttggagagctttcagcatgacagtagcagcagatggctagtctcactacgc

SEQ ID NO: 2266 - DNA, 424 bp, Chlorella vulgaris
gtgaaacatggcacccaagaagaaggttgcggcccctcctgccgcggtcaggaaggccgctcagccggccaagcccgtgaaccccctgtatgagaagaggccgaagaccttcggtatcggtggtgccctgccacccaagaccgaccttcaccgctttgtgaagtggcccaagtatgtgcgcatccagaggcagaagcgtgtgctcaaccagcgtctcaaggtgccccccgcactgaaccgcttcacccgcacgctggacaagaacatggccgagagcctgttcaagctgctgctcaagtaccgccccgaggacaaggcagccaagaagcagcggctgctggctgaggccgaggcccgtaccgccggcaaggaggtggagaagaagaagcccgtggtggtcaagtttgggctgaaccacatcacc

SEQ ID NO: 2267 - DNA, 420 bp, Chlorella vulgaris
  unsure (1)..(420): unsure at all n locations
gggatccggcaaggaagcaagatgccgatccagggcgggcacaagtaccaccagtatcaggtggtgggacgccaccttcccacggagagggagccggagcctaccgtgtaccgcatgaagctctgggccagcgaccctgtcagggccaagagcaagttctggtacttcctgaggaagctgcgccgggtcaagaaggccaatggccagatcctggcatgcaacgagatctttgagaagcaccctaccacggtgaagaactacggcatctgggtgcggtaccagtcgcggactgggtaccacaatgcgtacaaggagtaccgcgacaccaccctcaacggcgccgtgtcgcagctgtatcaggagatggcctcncgccaccgggtgcgccaccagtcgatccagatcatcaagtttgcgacc

SEQ ID NO: 2268 - DNA, 298 bp, Chlorella vulgaris
tccatgcgtgtgtcgctgtccgtttccgtgtccgcgggggtatcccccagggcacccgccacgtgatgcactcctccgtggactagtacggcacctaccgcggcaagttcatgagcccctttaccaacccgactgctgacttgacgggtgactacggtggggacaactgtggggagacctctgatctgtacacctattcccacaacatggacgtctacgtggacgatgacgtgatggatacgcggtgggccattcgtggcgtccttggctgcctgctggaccacctgcgggacctcaa

SEQ ID NO: 2269 - DNA, 140 bp, Chlorella vulgaris
ccctcgtgacacccagttgtgtgaagccctacaggtattacatccacgttgccgccggagttgggagttggcaaggcagcagcaaggatggaagttcgggcttgcctgatgttggccgtgggagcggtgctgttcctaag

SEQ ID NO: 2270 - DNA, 360 bp, Chlorella vulgaris
  unsure (1)..(360): unsure at all n locations
cccacgcgtccgtgatcaccgagagcgactacgtgggtgaggactacgaggtcttctccacctggctgggcaccacccagtaggcggcagctgctggcagctgagcctaggtctttgccgctgccgtcggcttgcagcggggctgctggcgacggcggcagcaggaggaacagagtgatgttgggaggctccctggccgccttagtgagctgcaccccggtccctatttgctggggttgctgtggcggagcagggagcgccgtgcggaggcagagtcggggtgctgtctttgcctgccgcgtggcatctcgtgtcgcagcagtggcagtagcggttgtggtctggtggggctangggctg

SEQ ID NO: 2271 - DNA, 385 bp, Chlorella vulgaris
cggacgcgtggggcagcggtgtgcacgctgcgagtattggtgtgctaagtaaagcttgtcagcatgggcaagtgcggcaagggaactggaagctttggtctgcgtcacaccaagacgcacggcctctgccgtcgttgcggcaggcgctccttccacctgcagaagagcacctgcagctcttgcggctatcccgctgctaagatcaggaagtacaactggggcaagaaggccatccgcaggaagaccaccggcaccggccgcatggcgcacctcaagctggtgcacaggcgcttcaagaacggcttccgggagggcactgaggccaagcccagggcagttgctgcatgaagagcttgtcagcgacactagggacagcgcagctctg

SEQ ID NO: 2272 - DNA, 403 bp, Chlorella vulgaris
cccacgcgtcgggcaacgctttgcacgctgcgagtattgatgtgctaattaaagcttgtcagcatgggcaaatgcggcaagggaactggaagctttggtctgcgtcacacgaagacgcacggcctctgccgtcgttgcggcacgcgctccttccacctgcagaagagcacctgcaactcttgcggctatcccgctgctaacatcaggaactacaactggggcaagaaggccatccgcaggaatagcatcggcaccggccgcatggcgcacctcaagctggtgcacaggcgcttcaagaacggcttccgggagggcactgaggccaaccccagggcatttgctgcatgaagagcttgtcagccacactaaggaaagcgcaaccctgaaacagtgcagctatcaa

SEQ ID NO: 2273 - DNA, 416 bp, Chlorella vulgaris
cccacgcgtccggccagataaggcgagaggagaggaggtacgggtatactgattgctttggtgggccattttctgcctgcttgttgccctggcttagatgcgggtaggcaatagagatcctggacgtaagcactgcccggcatcagcacatgcccgtgcgggctcctcaccattcacaggcacggagagtgagcccagctgcaggattgacttcgtccagcagcaagcggtgttcacatgccgggggaagctgtgtatgtacatgtgggacgcatgcaagattgccggtgcgaaggtatgcttgtggttgaaggatgtcttctaggggcgagggatcagtcaagccccacctgcatcttgtcatccttcaaacactcgcctgtgttgcgtagacagttgaagttgcttcctgggtt

SEQ ID NO: 2274 - DNA, 353 bp, Chlorella vulgaris
ggggccaccaggattatcaggatgggtcgccacaaggtgtctaagagttcggcgtacttcagccggttccaggtgaagtacaagcgcaggcgccagggcaagaccgactaccgcgcccgcctgaggctgtgcacccaggataagaacaagtacaacactcccaagtacaggctggtggtgcgcttcaccaacactgacgtggtgtgccaggtggcatacgccacgctctccggtgatgtcgtcgtcagcgcagcctacgcccatgaactgcccaactatgggctgaaggtgggcctgagcaactatgctgccgcctactgcaccggcctgctgctggcccgccggggtgctga

SEQ ID NO: 2275 - DNA, 438 bp, Chlorella vulgaris
ggtgaagtacgctaaggaggtggacaacgccaccaaggccgccaaggcccgggggtctgacctccgcgtgcacttcaagaacacgcgcgagtccgccgcagccatccgcggcaagagcctggtgaacgccaaggcgtacctggaggctgtcagtgatcacaagcgctgcatcccgttcctgcgcgacaatggtggcgtgggccgcaccagccaggctaagaatgagggcaacaagatcggccagggccggtggcccaagaagagctgcgagttcctgctgggcctgctcaaaaatgccgagagcaatgcagaggtgaagggcctggacacggacgccctgtacgtgtctcacatccaggtcaacaaggcgcagaaggggcgccgcaggacctaccgcgcacacggccgcatcaacccctacatgtccagcccctgcca

SEQ ID NO: 2276 - DNA, 428 bp, Chlorella vulgaris
gcgacaacaattctagcagtaccatgtcagcaggatggctggctcatgtgcacttcttttaaccctcaacactttgctaggggcatgatctgcagtggttttgtgtgacccagttgtttggccactgcctctgttaagtcgcaagtcttgcagttgctgacaagggctgcagccatattgtttgtttgatggtggcgtggttgtcattgcgaattggggcgagatactgtgcagttacgctttttagtgtttgtcggcttgctcagagtgtgcgtgtgatgcagtatggtggtgcatcatgggtgcgtgaggagctcttcatctaaactgctactggctgttgtgcgcgtgttatgcatcgtgggtgcacaggagctctttgtttgaactgttgccggctgttgatgcagatagccatagtatttgac

SEQ ID NO: 2277 - DNA, 216 bp, Chlorella vulgaris
gcgcatcatcagggctttcctggtggaggagcagaagatagtgaagaaggtgctcaagctgcagaaggccaaggagaaggcagctgaaaagaagaagtgagcagcggcagcgcagtgttgtcgttggcagcagcggacagcgagcagctgcaaggcgcaggcagcgtgcagtgttctgtggcagctggctggtttgctggtgtaacatgaactagc

SEQ ID NO: 2278 - DNA, 353 bp, Chlorella vulgaris
acgtgcaggtacacggtcacgcagtccgagccacacgtccgcttgatgaggttgcccatccgcacaacgcccttgaggctgtgcatactgatgtggactctttggccggcgtgctcaaggagaacaaggacgtgaaggacttcttgagcaaccccacagccaatgtggagaacaagaaagccctcatcaagcgcctagcctccgaatcaagtttcaaccagtacaccgtcaacttcctgaacctgctggttgacggcaaccgtattgacgcgattgatgacatttgcgagtcattttaagtgtcctattgcgcgcttaccgacacacaggtggccacgctgcgctctgctgtg

SEQ ID NO: 2279 - DNA, 409 bp, Chlorella vulgaris
gaatcaccgcaaggaccaggaggcgcaggttgcgcgcaagaagcgcaggtctgccaccaaggtgcagacgcgctcaattgtgggcgtgtccctggaggtgattcagaagaagaaggcagagaagcccgagcagcgcaaggcctcacgcgaggcggccctccgtgagatcaaggagcgtgccaagaaggcaaagcaggacaaggctacccagaaggccgccgcgaaggccgctgcccccaaggcctccaagaatgtgccccgtggcgctggcaaggcaggcgccaagtccactgggcgctgagctttgcggctagcgggctgtgggagcgagtggtgcgggcggcagcggcagcgcatggcatcggacacacgagtaggaaatagcagcgcatgttactgccgctacgtt

SEQ ID NO: 2280 - DNA, 375 bp, Chlorella vulgaris
acgctgagcctgatggaggagccgcacgtggactgcgaggtgcgggtggggccctcccccgacctcatggcgctgccaggtgtaccgcaggcagtacagctggcaattaagatggtggtcagcaagatgctggtgtatcccaacgagctggccgtgcccgtcatgcccaactttggtgccccacctccgccgctgggcatgctgcatgtcaaggtgatctctgccacagggctgagaagcaccttctgggataccgtggatccctttgtcaccatggaggtgagggaggggcggccaaagaagacccacgtgaaggatgaccagcccaaccccgtgtggaacgaggagtttgatttcgtggtggacgacacggac

SEQ ID NO: 2281 - DNA, 430 bp, Chlorella vulgaris
  unsure (1)..(430): unsure at all n locations
cccacgcgtccggtgcttgaccttgccggtgcaggtgctgcacagctacgatgatgttgtggttgccacgctggcggggcacgctcacatggatggctacttccaggatgagcacggcatacaccacagggtatgcaaggccgtccttgagacgcctcccggcagggactgctttggggtggtggacgtgttccctgaccggctggtggtcagaggggtggatacctttggcagcggggagtggtgcatcgggggagggcaagtggtgcggcggcagcatcgggaacataagcgacgagggacccttgcacaacggcaggagccgcagcatcaggagggctctgcgagcctttanagcaggcgaatagtagctggcgctgctgctggagtgtacaatacacacggctcatgatgatcatcggtatagact

SEQ ID NO: 2282 - DNA, 403 bp, Chlorella vulgaris
cttaaacacgattggttatggactgtgtggtgctgggagcgagttgagtttactcctcctgtgtgcactggggctccctaatcccactccccatgtgcactggttggacgggttttgggagtttcccgtctgacacccatgcaccccagccccagatcgaaccccagccgatatactagctgggcggcttggagtaagcggccaagttgaggattcaagtctccatatccatgaaagcgagggctagcgggccatgtgatgaatgggtggcggccagctagcagcgctcgagtggtgcatgccatcaaaccggtcactgtcagtgtgtcaatcctagctgtgatttcaagacccaaggtcgttccattgtggtggggatccagtggttcagcctgcagcaaac

SEQ ID NO: 2283 - DNA, 386 bp, Chlorella vulgaris
gttgctcggtgcgcgtctcggccttcaaaccactcagaatgcagaccgcccttgccaccagcttcgccaaggcccctgtggccacccgcaccgctggtgccaggcccgcacgcaccgttgccgtggtgtgccgcgcgcagcagcagcagaaggccgcagcagccctggccgccgtgcccgccctgctggccgcaagccctgcctttgctctggttgatgaccgcattgccactgagggcactggcctggctctcggcgtccacgaccccgccctgttctttgccattgctattgtcttcaccggtgtgtgggcagtgttctactctggggccaagagcctgggcggcggcaagggcgatgactctggcctgaccctctgagcgcag

SEQ ID NO: 2284 - DNA, 350 bp, Chlorella vulgaris
gggccgagccacgcgtccgcccacgcgtccggcctgttgtgcagagacaggtgcttcgcacgccttgtcggtgcagcacatttgtgggctccaagcttccaaggacgcacttgagggtgtcttcccggaacagcagcagacaagtgaccgtgtgcggcctgttcgggcttggccttccagaacttgcggtgatcgccggtgtggcggccttgatatttggccctagtaagctgccggagctggggaagggcctgggcaagaccgtcaagagcttccagacggcggcaaaggagttcgagcaagaactcaaggcggcgtcagccccagaagaggcgcagctgcctgccaag

SEQ ID NO: 2285 - DNA, 349 bp, Chlorella vulgaris
aggtaaacttttcgagtgaggtggccatggccatcaaggctgcaaatggccgggggtctgaactccgcatgcatttcaaccaatacgagcgagtcatgtcgcagctatctcgggaaatcagcctggtgaactttcttgcctttctacacgctgtcagtgttaagcaccatgcaatcggtttcgggctgaacactggtagggtcagccgtactaactagtcttgactaagggcaacaagatcaggcagtgcctgcggatcaaggttagctgccagttcctagcggaccatcgcattcttgccgagagcaatgcactggtgaagggcctgtccattgtcgccctgttcgtg

SEQ ID NO: 2286 - DNA, 413 bp, Chlorella vulgaris
cccacgcgtccgcccacgcgtccggtcgcggctcctgcaaacatgggtaaggtccacggctccctcgcccgtgccggtaaggtgcgcggccagactcccaaggtccccaagcaggacaagaaaaagaaccccaagggcagggcgctcaagcgcatcaagtacaacaggcgttttgtgaatgttgtggttggctttggcaagaagaggggccccaactcccagtaaagcctgagcctgggtcaacagaggccgccttgccagagagatgtaaaaggagttccgctgggggcgtggcacgagacttatgcagcctggcagtcacagcggggcagtcatagccaggcaggaccagcggaggaacactgcagtgacatatcttggctgtcagcttccccgatgtaagagctcagcgc

SEQ ID NO: 2287 - DNA, 312 bp, Chlorella vulgaris
cccacgcgtccgcggactcgtgggggaacacgttatactggctccttcacggaacaacgctactaagggcgccaaggctgcaaaggccgtcatgaagtcccaatggaagaagactcgcaagccccgctacagcgtggtcttccacaggcccaggacactcatccgctccagggatcccaagtaccctaggcatagcgctccctccctgcccaagatggacgccttcagcgtgatcaaggcccccttgaccaccgagtcggccatgaagaagattgaggacaacaacaccctggtgttccttgtggacgtgcg

SEQ ID NO: 2288 - DNA, 348 bp, Chlorella vulgaris
acgcgtccgggacagtttgctcgccatcacctaggcctcccacgatgcaggcactcggcatgaagaccgccctggcgggtcgcgtggtggccaccaagcaggccacccgcagcgcagcccgttcctccgtggtggtgagggctgagcgccctctgtgggcccctggtgtggcgccccctgaatacctggacggcactctggcacgtgaccgcggctttgaccccctgggcctgtgtgcggatgcagagatgctcacctggtactaccaggcagagctgcataacggtcgctgggccatgctgggcgttgctggcatcctcggccacaagatcctcaatctcaaccagt

SEQ ID NO: 2289 - DNA, 417 bp, Chlorella vulgaris
acccacgcgtccgcggactcatggacagatgcctgaaagcaaggactccgcacggataagctcctaagcagtctgctggtccgctgaaggcccacctgctttacaagcactcggttatcaatacataccacggctcataaccatacacaacgtgcaacaccttctttccttcggaagagcgatagaccttcagaacagtgaggaactagagcgtgcatgcctcagcttcgtaaccaggacctttgatgccgtggggcagcaccacgagcaggatgaagtcaaggcagcccttggcggccagatgtgagaacccgtatactgccttgctagaagagagccgacaggcacaagaggcgacaacgccgcggtcacttatgtccgttattggcacggtagtagaccccaacccagcagcct

SEQ ID NO: 2290 - DNA, 236 bp, Chlorella vulgaris
agggcacgcttggctgcatccttccccatctgatgcaccacaacggtagcgtcaccttttgccacaatcccgtgtggttcacagctggtgccgccatctttggtgattaatggcacaacgacctgagcatcccctccctctagtacgcagcacatccaacatggaccttcagctctcccagattgtgcccaagtgcctggttaacggctagcacatgaatggcggcaccgctggtc

SEQ ID NO: 2291 - DNA, 394 bp, Chlorella vulgaris
  unsure (1)..(394): unsure at all n locations
caccatcccacggtgcttgggatacctgcaggggtgtcaagcaggcatccgcaccatgcctttcaagaggtacgtggagattggccgtgtggccatgattaactacggccctgagtacggcaagctggtggtcatctcagacgtggtcgaccagaacagggccctgattgaccggcccgacgagacacgccgtgtggacaacttcaagcgccttgcaatcactgacttcaacgtggagattccccgcctggccaataaatccgtgctgaagaaggccctggaggaggctgatgtgttcaacaagtttgctgctancgcctggggccagaagctggccaagcgtgccgccaaggccgaccagactgactttgaccgctacaaggccatggtccag

SEQ ID NO: 2292 - DNA, 366 bp, Chlorella vulgaris
cccacgcgtccgcggacgcgtgggagcaaatatggccacccagacgctatcccagaccgtaatgggcgccatgcgcacccagggcgtcaggagggccgtgccggcagctgcagccttacaggcctcgatgcgttctcgccagccttgtcagctcgccccacagcggccagctgtggctaggcaggcccgccagctggcagtgaaggccacagctgctgctagccagggtggattacccatcgatctacggggcaagaaggcgttcattgctggcgttgctgacgatcagggctttgggtgggcgattgccaagtgccttgctgaggctggcgctgagatctccctgggcgtgtgggtacccgccct

SEQ ID NO: 2293 - DNA, 438 bp, Chlorella vulgaris
agtccaagccccttcagcaaaagatccacgatgcagaccgcctttgtccgctccggcctccgtgccgccgtccccaccgctggcaagggcacccgccaggtgacccgcgcctctgtggagtggtacggccctgaccgcgccaagttcctgggtcccttcaccaaccccccctcttacctgaagggtgagttcgctggcgactacggctgggacacctctggcctgtccgctgatcccgagaccttctcccgctacagggaggttgaggtgatccatgcccggtgggccatgcttggcgccctgggctgcgtcgtgcccgagctgctggaccgcaacggcaccgtcaactttggcgagaacgccgtgtggttcaaggctggtgccgccatctttggtgatgacgggctcaactacctgggcaaaccctccctcatccac

SEQ ID NO: 2294 - DNA, 424 bp, Chlorella vulgaris
cccacgcgtccgcccacgcgtccgcccacgcgtccgcccacgcgtccgcggacgcgtgggtgctgtagacgcttcatatccagccatgccttgggagggcgtccaggtgcctcaggatcccccaaattataaccctgaggacaaatatgccgacccggtgctctacttccagcaccgcgaggctgccacagcagaggagcttgtgaaagttgccgaggcaaagttgatcaggaacaagctgaagaagtgctacagggagtcgggcgtaaactacttgcaagactgccggcagctagcggagcagtacttggaggcgattaagggtgttggggtgtaccgctcaaactctgggcccaatgacaagcccaagtgggaggcttttggcgtcaggagaaactgagcagcttctgggcgccagcacaga

SEQ ID NO: 2295 - DNA, 426 bp, Chlorella vulgaris
  unsure (1)..(426): unsure at all n locations
cttattggttgaagtgagcaaaggcgctgataccgcggtgtgcggttattatgtagcctcggcaggatccatagaggcctcagggtggtccagaagtccaccgctgacatctgcatattggcatacctgactcctgacttgaaactcccacctgtcctagtcatggctcgacagaagcagacagcgcggaagaacgtgggcatcaagagccccaaggtcttgctggctaaggcggttcgcaagcagcccaaccccacgcggctgaatgccaagaagaagcctttgaaggcaaaggcgacggctggcccccagccacagaagcgcaagcaccgccgccggccaggagcgctggcgctcaaggagatccgccagnttccagcgcagcacaagctgctcatccccaaagcgcccttccaccgcctgctg

SEQ ID NO: 2296 - DNA, 402 bp, Chlorella vulgaris
  unsure (1)..(402): unsure at all n locations
ggaactctctgccctgcagcgctgctgttggccatctatctataccagggtggtcagctctggcatgaaaaccttgctggcaatggtcgtttacctgtctctttcgaatgtgctgtactaagaagtgtttgtggttgtgagcctggcgtcgtggctggcaggtggagggcttttttcccccgtcaaggttgttgaacgcatgctgtcaacaggggtacaacagtcatcttccgcaaaatgcccaacgacctaccgacgcctttgcaggctttgagctggggatcaagaccatgcggcctggaggcaagcgcagggtggtggtgccacctgagctgggccctcncaccggcccagccaccttcttcagtgccaagcagtttgaggtgggcagggctgggctgg

SEQ ID NO: 2297 - DNA, 413 bp, Chlorella vulgaris
cccacgcgtccgcccacgcgtccggattgagaaggagggccagactgtcagcaactccgtgtactacatgaaacagaccatcggcaacgcatgtggtaccatcgggctactacacgctgctggaaataacctcgaccaactgcagctggggaagggcagcttccttacgcagttcttcgaatccactgcttccatgaacccccaagagcgaggggcgtatctggagcatcccccacagggggctcccagcatcgactccatacatgaggcagccgcacagcagggccagacagctgctcccaatgccgaggaggaggttgacttgcactttgtggcctttgtctgtcgggacggctccctctacgagctagatgggcgcaaggcgggccccatcaaccatggccccagcagcc

SEQ ID NO: 2298 - DNA, 415 bp, Chlorella vulgaris
tgcatatactcgtcttcgtcacaagtaaaacatgcagaccgccatgtcccagagggcttttgtcgccgcacagcccgtgcgcgctgcccccaaggccacccgcgcagccaggtgcgctgtggtgctgcgcgcctccgctgaggagtctcgccgcgcagtgctgggcggcctgctggccggtgctgtggccctgaccgcgggcgccgccaacgccgccaacgacattatcgatgaccgcaaggccatcgagaagggcttcaactggacgtatgaggcacgcgacaccgacctgccccagaacgtgcgtgacggtctgacccaggcacgcgccgaccttgagggcctcaagaagcgcattgccgtcagcgagaagaagatcgacacggagctggagtcctacatcaagaagaactac

SEQ ID NO: 2299 - DNA, 396 bp, Chlorella vulgaris
cccacgcgtccgcccacgcgtccggcttcctgcctcatgacccgggcaccaatcggcagtgtgaaggaggacggcagcaaggcgtttgtcatccggccatacacacccatcagtgcagagaccaagggtcacctagacctggctataaaggtgtacccccagggcaagatgtcgcagcacatccacaacctagatctaggcgacacgcttgatatcaagggccccgtccccaagatccccctggctgacatcgccaagcgcaaggctgtaggcttggttgctggcggcacgggcatcacccccatgctgcaagtggtggaagaggctctggtgcagaagctgccgctcgacctgaccctcatttacgccaatgtgtctgagaatgacatcatgctc

SEQ ID NO: 2300 - DNA, 238 bp, Chlorella vulgaris
ggcgtgaccccttggttgtctactggcagcagcagcagcacccagcagctggacggtcgtattgagatgtgtgtgacgcggcaaaattcgtaacgcacgaggaaccgagaagagcacctttaattccccctgctggttggagttttgctgcatttgcactgtacactggcgggctgtatgcgcggtggcccatttgcttggctgcgtgtcctctagttttgtaacctccacattcccc

SEQ ID NO: 2301 - DNA, 429 bp, Chlorella vulgaris
  unsure (1)..(429): unsure at all n locations
ccccaagaaggttggtgaggacattgccaaggagacgtccaaggagtggaagggtctgcgcgtgaccgtcaagctgacggtgcagaaccggcaggccaaggtgaccgtcatcccctccgccgcggcgctggtcatcaaggcgctcaaggagccgcccagggacaggaagaaggagaagaacatcaagcacagcggcaacctgtcaatcgatgacgtgatcgagattgcgcgcatcatgcgcaaccgcagctgcgccgcctcgtttgccggcagcgtcaaggagatcctgggcacctgcgtcagcgtgggctgcaccgttgagcacgaggacccccgcgaaatccagtcaaagattgacgatggcgacgttgaggtgcccgangagtgaagctggaagtaccgcccggacccgtgttcgtttcagctgcc

SEQ ID NO: 2302 - DNA, 369 bp, Chlorella vulgaris
cgcagggagcgcctggtgtgtcagcaggcacccagcacatgctgcaaggtctgcttgggagggggatctacaggcgtagcccagctgtggcaggggtcgtaaccctgacactacccggctgccacccgccacatccaagcgcttgggtgttccccaacctccttgtcgtgagacggtctgcgtggtggatggatggcaccggccgggtgtctgcccagccgcctcactggccatggggcagggcagccagggctagggtgcgccaggtcaagggagggtggagcgggggctgtgctttcgctcgagtgctgggcaatacaaatggtagctagggcggctatggtcttccggagcctcgcccgaaacaac

SEQ ID NO: 2303 - DNA, 430 bp, Chlorella vulgaris
gcatgtttgcggaggggcaggcgtacgtcgcgctgtcgcgggtgcgatccctggaggggctgcagatcctgggcggcccggaccccaactgcgtcaaggtgtcgctggtggtgcagcagttttatgaggcactgcgcgggggcagggccctggagggaaccaccgcggcctgggaggagtggcagcggcagcacctctgcgaagtccccatgcagggggagtaccacccggggggcggtggggggccgccgccggacatccactcgggcgcggtaacggcgggtgcggggcccgggctcggccccggcatcagcaggggcaactgctacaagtgtggccaggcggggcactttgccagggagtgccccggagccggcggcagcgcatcccccgggggcctgtttgcgggagcacctgcagcagggaaccc

SEQ ID NO: 2304 - DNA, 396 bp, Chlorella vulgaris
cccacgcgtccgtattgcccttgtcgaaacctaagccaccatggttgacgagaagaaggtcaaggccgcaatcaaggagggtggcaagaagggcgtggacctatgcggtacctgcgacatgggcggcgtgtccttcttcaaccttgccatcgagtctgccgatggcgagtttgagctcctggacaaggtgctggagggagccaacgcccctgttgacgaagccgctgaggagcgcaagggcggcgccgctaacatcggcaagttcttcttctctgctggtgaccaccagctggctgccctgtgccacctgcccaaggccctggctgagtccaagagcgtgaagaagcaggactgggtggatgccgtgctcaaggtcctacccggcgcagagattgt

SEQ ID NO: 2305 - DNA, 391 bp, Chlorella vulgaris
cccacgcgtccgcggacgcgtgggaaaaaccaaaaacaacaaggaataaaaaaaaaaaagtcaaggccacaatcaagagaaggtggcaaaaaaggcgtggacactatacggtacctgcaacatgggcgtgcgtgtccttcttcaaccttgccatcgagtctgccgatggcgagtttgagctcctggacaaggtgctggatggagccaacgcccctgttgacgaggccgctgacgagcgcaagggcggcgccgctaacatcggcaatttcttcttctctgctggtgaccaccagctggctgccctgtgccacctgcccaaggccctggctgagtccaagagcgtgaagaaacacgactgggtggatgccgtgctcaaagtcctacccggcgc

SEQ ID NO: 2306 - DNA, 391 bp, Chlorella vulgaris
gcaggggtgaaacatggcacccaagaagaaggttgcggaccctcctgccgcggtcaggaaggccgctcagccggccaagcccgtgaaccccctgtatgagaagaggccgaagaccttcggtatcggtggtgccctgccacccaagaccgaccttcaccgctttgtgaagtggcccaagtatgtgcgcatccagaggcagaagcgtgtgctcaaccagcgtctcaaggtgccccccgcactgaaccgcttcacccgcacgctggacaagaacatggccgagagcctgttcaagctgctgctcaagtaccgccccgaggacaaggcagccaagaagcagcggctgctggctgaggccgaggcccgtaccgccggcaaggatgtggagaagaag

SEQ ID NO: 2307 - DNA, 378 bp, Chlorella vulgaris
gtggagaccctgcccatcagcaaccatgggtatctcccgcgactcgcttcataagcgccgggcgacgggaggcaagcagaaggcttggcgtaagaagaggaagtatgagctcggccgccagcccgccatgaccaagctgtcctccaacgtgacagtgaggcgtgtgcgcttgcgcggatgcaactctaagttcagggcgctgcgcctcgactcgggcaacttctcctggggctccgaggccgtgacccgcaagacccgtatcctggatgtgtcttacaacacctccaacaacgagctggtgcgcacccagaccctggtcaagaacgccatcatccacgtggacgcaacccccttcaagcactggtaccaggtgcacta

SEQ ID NO: 2308 - DNA, 356 bp, Chlorella vulgaris
gctgtgaaatgaggtcaaaggttcataagatacagaacctctctgagattatcggcgtccgcgctgctgttgccaggggcacccgcaaggtgacgctctcctccgtggcatgataaagtcccgacagcccaaagttcctgggccccttcaccaaccccccttccaagctgaggggtgttttcgctggcgactacggctgggagacctccggcctgtccgtcgattccaataccttcgcaagctacagggaggttgacgtgatccatgcccggtgggccatgcatgacgcccttggctgcgtcgtgcccgagctgctggaccgcaacggcaccgtcaactttggcgagaaggccgtc

SEQ ID NO: 2309 - DNA, 379 bp, Chlorella vulgaris
cgggtcaaccacgcctccggtggaatcgcccttcgacatgaggtccaaggttcagaagatgcagaacctctctgaccttatcggcgtccgcgctcctgtctcacgggggactcgcaacgtgacccgctgcaccgtggagtggtaaagtcccgacacgcgcaaaattcctgggccccttcacaaactcaccttcatagctgaaagttgaatacactggagaataaggactggacatctccggccggacgtccgatgccaataccttctatcgctacagggaggtagctgtagatcatgcacggtgtgcacatcttgacgcccgtggctgcatcgtgcccgagctgctggaccgcaacggcaccgtcaactttggcgagaa

SEQ ID NO: 2310 - DNA, 362 bp, Chlorella vulgaris
cccacgcgtccgcccacgcgtccgagtgcttaccctggcattgtgcagcctggaaggaagagggctgcgacgctggtaagcagtgcgagtgctgtgatgccctatcttagggtgcagttttcagtcttgtggactgcaggctcaggcaagaccaccctacttgcgctggtgaccggaagcagcgaggatgtagggcgggaagcgcgcgctgagggcgctgtgctactggatggagctccgctcaactctgcccttaggcgcaaggtggcctttgttccccaggatgacaccttgctgcccacactcactgttgccgagtgccttacatactcggcgctgctgccggtaccaacgagcctgac

SEQ ID NO: 2311 - DNA, 346 bp, Chlorella vulgaris
agcggcttcacaatgtcgaagcggaccaagaaggtcggcattgtgggcaagtacgggactcgctatggtgcgagtctgcgtaagcagattaagaagattgaggtcagccagcattccaagtacttctgcaccttctgcggcaagttctccatgaagcgccaggctgtcggcatttggcagtgcaaggcctgcaagaagacccttgctggtggcgcctacgtgtgcaacaccgccgccgccgtgactgtccgctccaccatccgccgtctccgcgagcagattgagaagtaagcagccaaacccagaaaggcagccgctacatcagcagcagcccaaccactagccc

SEQ ID NO: 2312 - DNA, 432 bp, Chlorella vulgaris
gtggatttcctgaagcagcatgggctgaccggcgccgctaaggctgccgccgacgaggtgggcgccaagctggccgatgcccagaagctgccaggctacctcatccaccaggtgcaggaggccgtggaccgcctgctggccttcccccccgtcagtaagctgctggaggctgctcggccgcaactggatgccgcctacgccacctacgccaagctgcatgacaacgtagtgacgtccccccgctacaagcaggcgtatgacctgtcactgcaggtgctgggccgcgtccaggctagcagcctgtaccagactgccgccacccggctgtaccctgtggtgcagccctatgcagaccccgcctatgcaaaggttgtgtcctcctcgtactaccagattgctgtggagcagctgaagccgaaggtgcatgcagca

SEQ ID NO: 2313 - DNA, 427 bp, Chlorella vulgaris
gtgaaacatggcacccaagaagaaggttgcggcccctcctgccgcggtcaggaaggccgctcagccggccaagcccgtgaaccccctgtatgagaagaggccgaagaccttcggtatcggtggtgccctgccacccaagaccgaccttcaccgctttgtgaagtggcccaagtatgtgcgcatccagaggcagaagcgtgtgctcaaccagcgtctcaaggtgccccccgcactgaaccgcttcacccgcacgctggacaagaacatggccgagagcctgttcaagctgctgctcaagtaccgccccgaggacaaggcagccaagaagcagcggctgctggctgaggccgaggcccgtaccgccggcaaggaggtggagaagaagaagcccgtggtggtcaagtttgggctggaacacatcaccacg

SEQ ID NO: 2314 - DNA, 329 bp, Chlorella vulgaris
gtgggcgtgtccctggaggtgattcagaagaagaaggcagagaagcccgagcagcgcaaggcctcacgcgaggcggccctccgtgagatcaaggagcgtgccaagaaggcaaagcaggacaaggctacccagaaggccgccgcgaaggccgctgcccccaaggcctccaagaatgtgccccgtggcgctggcaaggcaggcgccaagtccactgggcgctgagctttgcggctagcgggctgtgggagcgagtggtgcgggcggcagcggcagcgcatggcatcggacacacgagtaggaaatagcagcgcatgtaactgccgctacgt

SEQ ID NO: 2315 - DNA, 364 bp, Chlorella vulgaris
cccacgcgtccgcaatccgtctctggagccttccccggctgagaaggagacgtcaacatggtggctgccagcaagaagagcaagaagtctcatgagagcatcaactctcgtctggcgctggtgatgaagtccggcaaatataccctgggctacaagaccactctgaagactctgcgcaacggcaaggccaagctggtgattatcagcaacaactgcccggctgtgcgcaagtctgagatcgagtactacgccatgctctcaaagactggcgtgcaccactacaatggcaacaacgttgacctgggtacagcctgcggcaagctgcaccgcgtgtcagtgctgacaatcaccgaacctggtgact

SEQ ID NO: 2316 - DNA, 379 bp, Chlorella vulgaris
cccacgcgtccgggggttgatacgtcaagatggcggcagcactgcaagccaaaccgttcgtttgctgccaggctaagcagagcagggcacctaggaggtctgtggtggtctgcgctcagcagcgagacttgaagcaggagggcttgaagttcctggcagcgggcctggcagctgcagccctgctgcacggctccccggcccaggctggtatagaatatgtcaagcctgaaagccgcaaggtcttcattgacgacggcagcgcagccgccgtgaagaaggcagcccccgctgccgctgtggccaaaaaggccccagcagcgtccttccagggagagggcgggcccgacttcaagcttttcaccctgccgctgtcgctcgc

SEQ ID NO: 2317 - DNA, 371 bp, Chlorella vulgaris
cggacgcgtgggcggacgcgtgggcggacgcgtgggctgcttttcactggctaggcagctgtcctcctggttggtccacggtaggtttgctagctgttgagcagggcgcatgctgtgcaaccccatgttggtcccagtgccacgggcctggtaggagttgctaacaagcaattgcccacttctattgctcgtctcacgtgtctttgctaaattcttggggatacgcacagcccacgccaggaaggatgtctgccaggccacactgggggctgcgctgatgcagcgggtggtattcaacttccagggtaaatgcatgctcttcttagcacactggagaacctgccgcactttattccctcaaactcgatttt

SEQ ID NO: 2318 - DNA, 383 bp, Chlorella vulgaris
agcgattcgaactaacgcctatccgaggcttcctcgaagacagaagacatcaacatgtctgacggaggggacagcccgaaggccgccgaggcccccgccgccgccgcggctcccgcccccggcgagcccatggacatcaacaccgccatccagctggtgctcaagaaggcgctggctcacgacggcctcgcacgcggcctgcacgaggcctgcagggccattgagcgcggccaggcgcagctgtgcatcctcgccgacgactgcaaccagcccgactacaagaagctgattgaggccctgtgcgccgagcagagcgtcaacctcattgccgtgcccgaccccaagaccctgggccagtgggcaggcctgtgcaagattgacag

SEQ ID NO: 2319 - DNA, 390 bp, Chlorella vulgaris
gagtgggtgatacgaaatgtcaacccttagagaagtgccagcaagctgcagagtctctgtggggcgcaggttgggtgatctgctatgtcacttacgggctcctcgtcattgttgcttttgttagtaagggtggcgggcgtgcgcacagagaggagatagggtgtagctgtacttgatggtgatcatcgctttgcgtcctgtggggcagtacacgcatgggaatgacgacgttaggcatgtggtctgacaccctgttttgcctccccttacgcctatgctttcttttgctcttaaaatgtacctatcctcgcaactgcagcacagctaccagaaaagtttagtgtgggcggggtgtgtcttgaagttgtaccgtaccatgttggtacatga

SEQ ID NO: 2320 - DNA, 378 bp, Chlorella vulgaris
ccaagatggcgaaggacaagtctcgctccgccgaggtggtgacccgcgagtataccattaacctgcacaagaggctgcatggcataaccttcaagaagagggctcctaaggccatcaaggagattaagaagtttgcccagcaacaaatgaagaccagcgacgtgcgcgtggacgtcaagctgaacaaggccgtgtggagccagggcatcaagaacgtgcccaaccgcctgcgcattgtgatccagcgcaagcgcaacgaggacgacgacgagaaggaggagatgttctccctggtcaccctggccgaggaccagagcagcaagggcaagggcgtggtggtcctggaggcataaacacacacacgcgcctcccgggggg

SEQ ID NO: 2321 - DNA, 435 bp, Chlorella vulgaris
tgaccctcaagacttactatcagctgcatttcagccagtagaacagagcagtcatggcgtcccagctgcttgccacccgccctggcctccgtgtggcccctgccaccagcactcgcctgagccgccgctccgttgttgtgaaggccgccaacctgagcaccatcgagaagcagtacaaggagttcagggtcccccagatccctgtggccaccgtgtttggcattgccggctggctggtgcccgctgctagccccgcccctgccttcggcggtcgctctctcctgagtgtgttcaccgagagcatcggccaggagctttcccacttccccaccggccctgctctggactcccagttctggctctacctggccattttccatgttggcctattcgccaccatgttctttggtctgattggcgtcagcgctcgcatgc

SEQ ID NO: 2322 - DNA, 411 bp, Chlorella vulgaris
cggacgcgtgggtggggtgggtggagagagcacgatacaatgaagttctctacccgcgtcagctcctccaggcggaagtgccgcaaggcagacttctcggcgccctccagcgtccgcaggtcgcttatgagcgctcccctctccggcgagctgcgcaacaagcacggggtgcgctctgtgcccatccgcaaagacgacgaggtgaccgtcgtccgcggtacctacaagggccgtgagggcaaggttgtgcaggtgtaccgcaagaagtgggtcatccatattgagcggatcacacgcgagaaggttaacggcgcaaccgtgaatgtgggtgtcgacccctccaaggttgtgatcaccaagctgaagatggacaatgacaggaagaacctccttgagcggaagaagggcggc

SEQ ID NO: 2323 - DNA, 434 bp, Chlorella vulgaris
cattgtagtcggtcatctagttagaatggcgaccgttgcgtgcagctctagggccgtggtggctggctgcagcaccaaggtggtcgctggcctgcggcccctgcccgccgtgttcaggaagcccacccccaaccagcagttcgcggctgtgcggcgatccttgaaggcagagcgcaaggctaccgccgtgcaggcgaccagcgccatggaggtggcccaggtggctgtggacactggactcatcttcggctctgcggctgtcatggtcggccttacgcttattggccttgccgtcggttttgtgctcctgcgcgtggagagcttggcagaggagggcaagatctgaggggagccttcatgcttgtccactgcctggcacaacttggcttatctgccgtgtgttctgattttgtatcgagaaagaaaacttatat

SEQ ID NO: 2324 - DNA, 367 bp, Chlorella vulgaris
cccacgcgtccgcccacgcgtccgcccacgcgtccgcccacgcgtccgggcggcaagctgattgatgccgaccccaacctggattgggccgccaacctggcacacatgatgggctattccgacgagggctgcctggagatgatgcgcctgtaccagaccatccatgccgaccatgagggaggcaacgtgtcggcacatgccacccacctggtgggctccgccctgtcagacccctacctgtcctttgctgcgggcatgacgggcctagcgggccccctgcacggcctggcaaaccaggaggtgctgcggtggattaacgagaccacacacgacctgggaaccgccacccccaccaaggagcagctgc

SEQ ID NO: 2325 - DNA, 389 bp, Chlorella vulgaris
gggctacgagcgcctgacggccgagctggtgcagctgttcttcatgcccatcaagaagtgcggctcgttggacatggagcccgagctagagaagtcttacatctactgagcgcctgggcctggccttgtggcaatgactactcagcggctcgctgagtaatccactgcatggctagtgggtgtttggcttgtggcataccactgtttggccaggctgtgctgaagcctggggccttggggttccctgctgcgcagccctgcctgcctgcttgaagcctttcccgctcggcgagtagcgctgtgcgggctatgctgtgtggcgctgtgttgaggggtgggctgtgatggcggcgggagggcacgctagcagcgtggcaggggtcctaagg

SEQ ID NO: 2326 - DNA, 369 bp, Chlorella vulgaris
cccacgcgtccgctggctgcccgcgctgtgcaagaagatgggcgtgccctacgtcatcgtcaagggcaaggcccgcctgggcaccgtcgtgcacaagaagaccgccactgccctggcgctgacggctgtgaagaacgaggaccagcgcgagtttgccaagctggtggagagcgccaagtccatgtacaacgatgggccgcgcgtgaactggggcggtcacatcctgggcgtgaagagccaggccaagctgcgcaagagggagaaggcgctggccaaggagcttaacacacggccctgagcaactgggcagcagcggcagcactcccatgcagcagcggtgcttcacaaagtaccagagtgcaaggcaat

SEQ ID NO: 2327 - DNA, 397 bp, Chlorella vulgaris
ggttgagggctaccgcgtgaacggcggccccgctggcgagggccttgacgccctgtaccccggcgaggcctttgaccccctgggcctggccgacgaccccgacagcttcgctgagctcaaggtcaaggagatcaagaacggccgcctggccatggtgtccatgcttggctttggcgtgcagggcctgctcaccggcaagggccccctggagaacctggctgaccacctggctgaccccaccgtgaacaacggctttgccgtggccaccaagttcacccccggcaactgagctggttgtcttgacggacgtttggctgtgctgcttgacaggctggaggtcagcattactatgctggccttgtcttgagaagaaaatccttgtgtaactagctaacca

SEQ ID NO: 2328 - DNA, 372 bp, Chlorella vulgaris
cccacgcgtccgcccacgcgtccgggctgcgccaactctggaatcaataacattggctctcacaactcagggagcaatgtgcgcggcaatgacaactcgggcagcaacgtttggggtgactccaactctggtagcaacttgattggctcaggcaacagtggtagcaacgtcattgggaccaacaatgggcccttcaccctgtagaaccccacctttacacacttcatgaagaggccaactcctcaaatgcaacgacttttgcgaagctgatgattcggacaacgtccatatgggacggaagcaattttggcggggatcatccacgggggcgtcaagcacccagcactgcaaggatgcaggtcttgaaacctc

SEQ ID NO: 2329 - DNA, 383 bp, Chlorella vulgaris
accagtgctgcagcagctgctgcagcgcaccaacagggcctgtctggcgcgcccacaataaccaagctgctgggatttggaggtgccatccccttcctggccttgtcaccctttgctgccacccacctgcccctgtggcttttagacccagctctggtcacccactgtggggtgctacagataggctacggtgccaccatcctgtcgttcctgggtggtgtacactggggagtagccatgaccaacattggcggggctgtgggtgccaggctggctcaggagcggtacttgtggagcgtactgccctgcctgatgggctggcctaccctcatactcgacatctcacatgcagcagggattcaggctgtattgctgggaattgt

SEQ ID NO: 2330 - DNA, 364 bp, Chlorella vulgaris
cccacgcgtccgcccacgcgtccgcccacgcgtccgcccacgcgtccgcccacgcgtccgccttctttcgtattgttaccagggaggctaaggacactttgcttgtttctgacggctagtatcggtccttgctgcttgagtcccaggctgatggcatggagggccctgtgcagagtctttttgtgacattacggcggagccttgccaacacacgggagcagcatgtcagggtggtccagtcgctggggctctggcgacgggaacagactgtggagaagcctaacaatgcttcagtccgaggcgcaatcgacaaggtgaagcatcttgtgtccgtggagaccgatgtggggcggcaagccaggct

SEQ ID NO: 2331 - DNA, 405 bp, Chlorella vulgaris
gtcggccaacatggttagccgtctgagcaagaaccgcaagaagcgcggtcatgtcagcgccggccatgggcgtatcggcaagcacaggaagcaccccggtggccgcggtaacgccggtggccagcaccatcacaggattatgatggacaagtaccaccctgggtactttggcaaggtgggcatgcgctacttcaacctgaagaagaacaagttccactgccccatcgtcaaccttgacaagctgtggagccttgtgggcgaggaggctcgtgttgaggcctccaaggactcgagcagcgctgccgtgattgatgtcaccaagtatggcatcttcaaggtgctgggcaagggcgagctcccgcagcagccagtggtggtgaaggccaagtttgtgagcaagctggc

SEQ ID NO: 2332 - DNA, 384 bp, Chlorella vulgaris
cggacgcgtgggcggacgcgtgggtgccttggctcttcgttcatcgggtgggccggtcaaaaatggcggatcacgaccacgagcacgatgttcacttcgagtctgccgatgccggcgcctcaaagacctatccccagcaggctggtaccatccgcaagaacgcatacatcgtgattaacaaccgtccctgcaaggttgctgacgtgtccacctccaagaccggcaagcacggccacgccaagtgccactttgtgggcattgacatcttcaccggcaagaagtacgaggacctgaccccctcctcccacaactgcgacgtgccccacgtgaaccgcaccgagtacacgctgctggacgtctctgacgacggctttgtgtcgctca

SEQ ID NO: 2333 - DNA, 444 bp, Chlorella vulgaris
gcagcgcagtacataggccgatggccagcaaccatgacccaaggagtacgctccctgttgcggttggccgcctgcaggtcatgctccatccagtcgtacatgagccgcatgctggccacgctaaaggagtctggccaatacaacacctctgtgttgtacaccaggacatgcatcgggcctatgtcaaaggagtagaacaaattttcgcccaggggccgattaggcatggtgaacaattccctgtaatggctaaaattgtagtgcacttcatggttgcctgggagcaccatgtagggcaggcgcgaggccatgggctccacccgccgaaggaactgggcggccctccgtccctgcaaaccctggaggtcgtaagctaggtcgccaatgtgcatcagggcgtcatactggccgccatgcacttcccggaccaggtcaggcaccgtt

SEQ ID NO: 2334 - DNA, 435 bp, Chlorella vulgaris
  unsure (1)..(435): unsure at all n locations
gtcacaaggtgacgggtgtaccgctgttgggcaggatggtgacaccgcaaattttggtgggtaaaaaaaagggtgtgcctgcgcagtggagcgctgcccaattttgctgtttgtgcaaaggtatatgctccttcgcccttcaaatggtggtcatgaacagatgtgcggtcttggacagctgcaattgtgaggtgggaggtctttcctcagccagtacatagtattgcgctgttgaggttcactgttgaggtggctaggttcagcagcttggtggatttggcttgcaaggcttagatgggactgcagcaactaccaaatggtactaagtgctggttgatgtggactacgcacccctgctgcagtcctatgtaatcagatggaacacctcatgaccgtgctgaggcangctacgtacggtatgaatctgctgtgtgt

SEQ ID NO: 2335 - DNA, 431 bp, Chlorella vulgaris
gttccagagcctgcgctacgagggcgccaagatgtgggctccatcatacttcttgagtcggaaactgagcaggtgtgccaacccttgaactcactaagcagatttactgactatttaacggtagatggtactggtacatgctgccgttccaccaggattttcctgttcatcatatagacttggcccgtgacttcgagatgaccatccttagctgcagcaaagggctcagcgctgccagctgagtggacttgaagctatgtggacaccatatagtggcccaccttgtcaagggctacaaggcatgagcgagcccagaatgacgtggacggtgacgccgtcccatgtgccgacactttggggcagcactctctgtggaccaattcgaacaactcgcagagcgtgctcaggaactgggcatagagtttgtgata

SEQ ID NO: 2336 - DNA, 356 bp, Chlorella vulgaris
aactagtcaacattgtgactgcacctgggcggtgcctcaagcatttggtcatgcagtccctggccacgtttacaggcttccggcctaacagcgtggccccacggcccgcggctcgcaagctagtgggacagcgcaaccagctgtgcgtgagggcttctgtggtggccgcccctgctgagcttgaggtcaagtcgcttgacggcactgacgccggcacagccagcctttctctcaaagttgctgaggatatcgccaacggtttggtccaccgctacttggtttatgcgcagcagaatgctcgcaggggcacagccagcacactaacgcgctcggaggtcaggggccgcggcaaaaag

SEQ ID NO: 2337 - DNA, 384 bp, Chlorella vulgaris
gttaaccatgctgcgccacggactcactctgctacccctagcggcggtcctcggaatcgccctggactctgaagcgagcattgcaacaaagctgacggcagacacctttgacgagaagactgctgacagcaaggtgtggttcatcaagttctttgcaccctggtgcggccactgcaaacggttggctcccacatgggacacgcttgctaacgagttcaaggacagcgacagcgtgcatgtggcaacagtggactgcactgttgagaaaggcatctgcaacatagcagagatccgtggttaccccacgctgaaggtgtatcaagggggcgaagccaaggaacagtatcgtgggtcacgtgagctgtcagcactcaaggagttcct

SEQ ID NO: 2338 - DNA, 347 bp, Chlorella vulgaris
tgggggagtgcttggttaggttgtaacagttgcttctgcaagtgaaaccgaaccaagaccaagctaagttggcccaccgggctctgctttcctttcccccacgagctctgaggctgatcaacaaatcaccatgatgggtttgtggcaaggcctactaaattggctacaaaccctcttcttcaaaaagaaattggactgaaccttataaggctgcaaaatgccggcaagacctcgctcgttaacgtcctgacaaaacgggagcctccaaaggagatgatgcccacagtgggcttcaaaatacgcaaagtcaccaaagggggcgtgaccatcaagctgtgggacctggg

SEQ ID NO: 2339 - DNA, 394 bp, Chlorella vulgaris
cccacgcgtccgcccacgcgtccgcccacgcgtccgatcgagggctggaactcgcgtgccaaggtcggcgccgacctgaccgtgcagaagctctgaagctccacggtgcctgtgttgggtcagggggcctgggagccccattcctaggtttgggtggggttagggggcctgacggtacagaatctagcttggtggggccgctgctcctgctcggttcgcgtttccctacctggggccgctcagtcacgtttgaggtgagacttgtcaggtttctagtccacagcccacgcgagtttatgttactgtgtcgatggtatgtggccgtggtggcctcgtggcaagcattgtgatgtagcgagggtaggccccactgggtttcccggggccgtctgga

SEQ ID NO: 2340 - DNA, 387 bp, Chlorella vulgaris
cccacgcgtccgcccacgcgtccgcccacgcgtccgatcgagggctggaactcgcgtgccaaggtcggcgccgacctgaccgtgcagaagctctgaagctccacggtgcctgtgttgggtcagggggcctgggagccccattcctaggtttgggtggggttagggggcctgacggtacagaatctagcttggtggggccgctgctcctgctcggttcgcgtttccctacctggggccgctcagtcacgtttgaggtgagacttgtcaggtttctagtccacagcccacgcgagtttatgttactgtgtcgatggtatgtggccgtggtggcctcgtggcaagcattgtgatgtagcgagggtaggcccactgggtttcccggggccg

SEQ ID NO: 2341 - DNA, 382 bp, Chlorella vulgaris
cccacgcgtccgcccacgcgtccgcccacgcgtccgcggacgcgtggggaagatcctgcagctgctgcgcctgcgccagatccacaacggagtcttcctcaaggtgagcaaggccaccatcaacatgctgcagcgcgtggagccttatgtggcgtacggctaccctaacctcaagacagtgagggagctgatctacaagcgcggctttggcaaagtgaacaagtcgcgcgtggcgctgaccgacaatgccatcgttgaggaggctctcggggagaagggcatcatctgcgtggaggatctgatccacgagatctacactgtgggccccgccttcaaggaggccaacaacttcctctggcccttcaagctctcgtccgccaaa

SEQ ID NO: 2342 - DNA, 258 bp, Chlorella vulgaris
cccacgcgtccgcccacgcgtccgcccacgcgtccgcggacgcgtggggaagatcctgcagctgctgcgcctgcgccagatccacaacggagtcttcctcaaggtgagcaaggccaccatcaacatgctgcagcgcgtggagccttatgtggcgtacggctaccctaacctcaagacagtgagggagctgatctacaagcgcggctttggcaaagtgaacaagtcgcgcgtggcgctgaccgacaatgccatcgttga

SEQ ID NO: 2343 - DNA, 387 bp, Chlorella vulgaris
gttctctttggtgtgcccctggcccgcatcctgaggtagctactcgtccagactacctggctgcgcacctaccaagtccattgcagtgtccaatggtaggttggcggggttgcctgcgcaacctgtcccaattctgggtacaccaaactcggattagtcccattcttttgtttcattccccacacagaccctaggagtaatgcgatgcgagtctccgttcaatactttgttagcactcgggcaatttcgtaccaatgaaattgttttgttttagacgtgctgttgcacggctaggttcagttatctgccttcacgtctgcccacgactgtacaacatgcgttagtgccaacgtttcacttcctaatgacaaggacgcttgcacctgt

SEQ ID NO: 2344 - DNA, 433 bp, Chlorella vulgaris
ggagctgtcagcagccaaggacgcagagatcaagtactccactgtgcagaactggtatgctggcgacgaggagggcaagggcggcattttcaactttgtcaccaagcgcggcatctgcctgggggagaactctaagatctcttggacacaggtggagactgggtcggccatcacctggaagtaccccagcgttgtcctcaagggggacaacagtgttggcgaattttacagcgtggccctcaccaacaacaggcagcaggcagataccggcaccaagatgatccacgtgggcaagaacacccgctcgcgcattgtatccaagggcatctctgcgggccagtcggtgaacgcttacagagggttggtccaggtgcagcccacggcccggggggcgcggaactactcccagtgcgactcgatgctcattggtgac

SEQ ID NO: 2345 - DNA, 412 bp, Chlorella vulgaris
  unsure (1)..(412): unsure at all n locations
atcgagttggccttgagccgacgcgtttgacgcccgcagcagcacctaacacacgcaccaggcaccatgctcatctccaagaagaacaggcgtgaggtgtacaagttcctcttcaaggagggtgtgctgtacgcggagaaggacttcaacctgccggagcaccccgagattgagggggtgtccaacctggaggtcatcaagctgatgcagtccatgaagagcaaggacttggtcagcgagcgctatgcctggcgccactactactggttcctgacggacgcgggcatcgagcacctgcgtgagtacctgaacttgcccagcgagattgtgcccgccacactgaagaaatcgaccaggcctctggagcgggagggcgcacgcncgccgcgcggcgacaggccgccccgccgct

SEQ ID NO: 2346 - DNA, 437 bp, Chlorella vulgaris
agcgattcgaactaacgcctatccgaggcttcctcgaagacagaagacatcaacatgtctgacggaggggacagcccgaaggccgccgaggcccccgccgccgccgcggctcccgcccccggcgagcccatggacatcaacaccgccatccagctggtgctcaagaaggcgctggctcacgacggcctcgcacgcggcctgcacgaggcctgcagggccattgagcgcggccaggcgcagctgtgcatcctcgccgacgactgcaaccagcccgactacaagaagctgattgaggccctgtgcgccgagcagagcgtcaacctcattgccgtgcccgaccccaagaccctgggccagtgggcaggcctgtgcaagattgacagcgagggcgaggcgcgcaaggtggtcggctgctcgtgcgccgtggtcaccgacta

SEQ ID NO: 2347 - DNA, 175 bp, Chlorella vulgaris
ccggtgatccccgtctcgcaatagttccagggcaatcactatgcaggcaaccatgatgaagaccttcggcgccagcctgcgcaaggctgtgcccacccagggcaagggcacccgccaggtgacccgcgcctccgtggattggtacggccctgacagggccaatttcctgggcccc

SEQ ID NO: 2348 - DNA, 203 bp, Chlorella vulgaris
acaggaaccaccgcggtttgcgtcactactggggcccgaccgtgcgcggggagcacaccaagacaacagggcgccgcgggaaaaccctgggtgtcgccaagaagcgctaagcttcatcagtggagagaagagcagctacggctcggcgatgcatggtgataatggcattccgctttcagaacacatgtaaagccaagccgctc

SEQ ID NO: 2349 - DNA, 380 bp, Chlorella vulgaris
ctgtccctgtctaccagggtaacccatcagcagggattgaaggccaagaacaatggtcaggcacaacaacgtggtgcccaaccagcacttcaggaagaagtggcaggacaaagtcaggacctggttcaaccagcccgctcgcaagctccggaggaggaatgcccgcgccgagaaggccaagaaggtgttcccccgccccaccgcgggcgcgctgaggcccatcgtgcacggccagaccgtcaagtataacatgaagaagcgcgcgggccgcggcttcacgctggaggagctcaaggaggctggcattccctccaagcttgcccccaccattggcattgcagtggaccaccgccgcaagaacaggtcccttgaggggcttc

SEQ ID NO: 2350 - DNA, 119 bp, Chlorella vulgaris
accaagttcaccccctgaattcagccctgaattttgagggaaatcccctggctggtgataattcctcgttgttctatctcttggttggttgccagtgtgtcgctgatgtgctcaagggg

SEQ ID NO: 2351 - DNA, 371 bp, Chlorella vulgaris
cctggaggctctgaaggcacaccttgcctcccccctgacggcaaatttcgcaacaaacggcttgtccctccccttcaaaccggcttcaatcccccaatggaccgatgtctgctgctgtggcggcggtttaactggaaggctgaagggcgtgctaagcacatggcatagcttgcaattttgaggtggccaagatgtcaatgtaacccgcacgttaggttgtagggatgaggttgtgcttgtacgctggtggtgctgctgctcaacacacgaagcccagttgcgtggctatgatatgacgtaggccccatgagaagagaattctgacattgctacattttctcttgcaacatttaatcccacttcatggcagg

SEQ ID NO: 2352 - DNA, 236 bp, Chlorella vulgaris
cctgtaggctacagtttgagggagcatcaccatgccggcgggacagggctacagggcccgcacgaggtatatgttccaacgccccttccggggcaagggatacattcctctctccacttacctgaccaactacaaggtcggcgaatatgtggacgtcaaggttaacagcgcagtgcacaagggcatgccccacaagtactaccatggcaagactggccgcgtgtggaacgttacca

SEQ ID NO: 2353 - DNA, 437 bp, Chlorella vulgaris
cccacgcgtccgggctgttctttcgttttcccatggtgatgggtactgaatcagagctcacagagatagaaaacctgctgaacacagcgactgcatccctggagggccagtgggagagtctcgatgatggagctctcgcagaacagatcgccaagtatcgaaccgctctgacggacatcagcaagcgccttgccaacttagggatcaagatcgacttggaagaggaggcgcaagggcggccctctggggatggcggtgacccacatggcgttgagggggtggactacacactgggctcggtagacgacttggaccctagcgagtggcaggtgccgccccactgcgtgcccatccatgcaaatgtgacaacctacagctggccgcagctgtaccgccaaacgcagtttgacgtcattatgatggacccgccatggcag

SEQ ID NO: 2354 - DNA, 229 bp, Chlorella vulgaris
gcagcaggcgctataaggcagattggcgcctggccagcggcgtcagttgccaaggcagggcggcacttgaagttgccctcatcgcagtccaggcgccacgttattcaagtcagggcggcagccactgaggctgatcaacaaagcgcaacgatggtgtctaagacacgagttgctgtgattttttacagtgcttacggtcatgtgaagactttggcagagaaagttgtag

SEQ ID NO: 2355 - DNA, 413 bp, Chlorella vulgaris
cggacgcgtgggtccgcttatccgccctcaagccgagccagagccacgatgccctgcccctgcacaggcaaagagcagtgtgaatgcggcgctggctgcaagtgcgctgcccagtgtgggtgccccaagtgtaaggacggctgtaactgtaaggacaactgcgactgtgacaagtcggtctgcaagtgctgcaagtgagtgaggcccttccctcgcacgccaaccctgccagccttcaggctgcgggaggcctgtagcgaagccctaccaacacttgtgtctgagcaagcacatcaagcagcccccgtcccgccttttgttctggtcaccttctgcctgtgcgcgcctggaagagtatgtatgtgagcgtgctgctgtttaaacggcaagcatgcagcttgtagctcaaatag

SEQ ID NO: 2356 - DNA, 404 bp, Chlorella vulgaris
cagcccgcccaagcgcagcgcagtggagatcatcaaggagaattctgactttctgcgacaccctctgatggaggacctggtcagcccggagcccaacgtgtctgagccgtcggtgcagctcatcaagttccacgggagcgacatgcaggacaagcgcgagcagcgcacttttggggctggcaagtcttaccagttcatgatgcgcacacgccagcctggcggcgtggtgactaaccaactgtaccttatcatggacgagctggcggacctgtacggcaaccgcacgctccgcctgaccacccgccagacctaccagctccacggcgtgctcaagcagaatctcaagacagtgttctccactgttcttaagaacatgggcaccacgctgggcgcctgcggtgacg

SEQ ID NO: 2357 - DNA, 363 bp, Chlorella vulgaris
cggacgcgtgggcggacgcgtgggcgcggtcaccgcattgaggacgtggccgaggtgcccctggtcatcgatgacagcgccgagggcgtgaccaagaccaagaaggccgtggaggtcctgaagaagattggtgcctacactgatgtggagaaggccaaggactcgaagaacctgcgccgcggcaagggcaagatgaggaaccggcgctacgtgcagcgcaagggccccctgctggtctatggcaacgactctggtgtggcgcgcgccttccgcaagcttcccggcgtggaggtggcatccgtggaacgcctcaaactgctgcagcttgcgccaggcggctacgtcggccgtgtccgccactgg

SEQ ID NO: 2358 - DNA, 429 bp, Chlorella vulgaris
tgggtggcggccagtcagcgtcggtgccggcgtcaccgcagtcggctggggccgcgccagcgggggcagcactggcgcagcacctggccaaccacgctatgctcagcagctagctagctagctgcctgacctgacctaacggtaagggacagctggcagcaatcagcatgaccagcttgctcggtggcaggaggctgagtaaggaagctgcgcaaggccaaggacagcggtgctgggcttgctctgttgccctaccatcaaccccggccagcttggaggtaggatgtggagctgcaggatggcaactgtttggcgctggtgttgaggtttttggtgtcaatgcaaatgttccagctgttctttgtggtgtcataggccgagcagcacacacacagatgttgttgtttcacaaatgcgtggtagttactc

SEQ ID NO: 2359 - DNA, 400 bp, Chlorella vulgaris
gtccgcccacgcgtccgggcttgtcttccgcaagccaaaatgccgtccataggcttttaccgcaactatggcaagaccttcaagaagccccggcgccccttcgagaaggagcggctggatgccgagctgaagaccgtgggcgagtacggcctgcgcaacaagcgcgagctctggcgtgtgcagatggtgctgtccaagctgcgctccagagcccggtcactgctgaccctggacgagaaggaccccaagcgcctttttgagggtgaggccctcatgcgccgcatgtaccgctacggcttcctggacgagacccagaacaagctcgattacatgctggcgctcaaccctaccgacgtgctggatcgccgcctgcagaccctggtgttcaagctgggccttg

SEQ ID NO: 2360 - DNA, 336 bp, Chlorella vulgaris
ggacgatggcgggcacgacggcggggatggtgatggcggcgctggactgtttgacaccctgcgagacttctttggggagtgagctacctacagcgctaccggactcagcctggcaggatcgctggccttgttgtgttgtcttgtgtactctgtcacttgctgcttggtgcttgaacatatcgctactctcatgctcggttggccagtgctggcaatgtggcctgcctttaccgggctggctttggttgtccgtgtggacagcagccttgtgcagcgcatctgtgacccacttagtggcatgactgatgagcgatgcctgtcaaactccttccagtg

SEQ ID NO: 2361 - DNA, 368 bp, Chlorella vulgaris
cccacgcgtccgtctgcttctgtgggctgtgagcagcaggggggctgccacaatgaaacagctagtctcttcccgcaccatcgacatcccttcgggggtggagattgaagtcaaggcgcgtaaggtccgcgtcaagggccctcgtggcaccctgacccgcgacttcaagcacctggcggtggacatgttcctgtccgaggaggagggcgtgaagaagcttaacgtggactgccactttggcaagcgcaaaagcctggcagctatccgcacagccacctcccacgtgcagaacctgatcactggcgtgaccaagggctacgagtacaagatgcgcctggtgtatgcccatttccccatcaacatcaaca

SEQ ID NO: 2362 - DNA, 432 bp, Chlorella vulgaris
cccacgcgtccgatgccgcctaagcgtaggagctctcaggaggagaatgtcaccctgggccctgccaccagggagggtgagctggtgtggggtgtgtgccacatcttcgcgtccttcaatgacacctttgtgcacgtgactgacctgtccggcaaggagaccctggtgcgcgtgactggcggcatgaaggtcaaggccgaccgtgacgagtcctccccctacgctgccatgcttgccgcccaggacgtggccgctcgctgcaaggagctgggtgtgaacgctctgcacatcaagctgcgcgccactggcggcaaccgcaccaagacccccggcccaggcgcccagtccgccctgcgtgcgctggcccgctctggcctcaagattggccgtatcgatgatgtgacccccatccccaccgactcctaccgccgc

SEQ ID NO: 2363 - DNA, 363 bp, Chlorella vulgaris
  unsure (1)..(363): unsure at all n locations
gtgaggttttcgaaaccatggtcaatgcccgggcgcacacgtcaagccaaaaccacacagccagcccgcacgacagcgccaagctcggcggcgaggtgggcaacatctcgctgcagtctgccagcgggcgcacggggcgggagatgccgcgtggcgtgcccgctgaggggggcacagagcgggcagagcacgaggcaaatggcgactacatggagctggagatgatggacccngagggtgggcggcgatacaatgctgccgcccccgggggagggcagcaggcgcagcatgcaaagcacgaccacccccatgggctggagggcagccttgtgatggaccaatcggactccccggttgcaaggg

SEQ ID NO: 2364 - DNA, 172 bp, Chlorella vulgaris
aggtactgtgtataggaacacgcgtgtacgcatggaggccatccacaaggacaaggcacagagtgatacacgagatcagcttgtgtgcatgtccctgaaggtgattcagacgaagacggcagagaagccctgaccagaccaaggcctcaagcaaggcggccctccctgagat

SEQ ID NO: 2365 - DNA, 182 bp, Chlorella vulgaris
cccacgcgtccgaaagacattccctagcagtcaccaaaaccggccagtgctccctgtgtggtaaagcacatgggccctcgtgctggaaaaggcctgcgacgcggtaggatgaagcaccgcgtttgtggctcctagggcgtagccgggggggcaagcgctctgcgatgtggcgtggctttaag

SEQ ID NO: 2366 - DNA, 419 bp, Chlorella vulgaris
gcgcgcaagccggtacgcaccatgcagtttgttcaaaggcgcccggaccccaaggttgcccggaaggagctgcagtataacgtatcagtgttcgcggctaccatccttgtagtgcgggttatcccttacatcctgcaggcgctgcagaagcagtcttgatcagacggcttcccttgtagctccagcgctctgaaagaagatgtgtggcatttttggctactacaacttccatgtgggacgcacccgaaaggagattttggactgcctgctgacggccttgaagcggttagagtacagaggctatgactcggcaggggtggcgcttgacctggagccctgcccacagaacggcttcgccaacggcgtgtctgtctgcgccgcaggtgcgtatcacctgccgcagcgcttgctgagctgga

SEQ ID NO: 2367 - DNA, 410 bp, Chlorella vulgaris
cggacacgtgggcccgggggtacgacaagagtggaaaggaagaaggtccccggcaagggtggcgagcggtggtacaagaacattggcctgggcttcaaaacccccacggaggccattgagggcaactacattgaccacaactgccccttcaccggcaacgtgtccatccgcggccgtatccttgccggcaaggtcaagtccaccaagatgaaccgcaccattgtgatgcgccgcgactacctgcactacatcaagaagtaccagcgatatgagaagcgccacaccaacatctccgcccacatcagcccttgcttccgctgctcggagggcgacaccgtcatcattggccagtgcaggcctctgtccaatactgtgcgcttcaatgtgctgcgcgtgatccccgccggctc

SEQ ID NO: 2368 - DNA, 422 bp, Chlorella vulgaris
ctgctcttgccagcggtcgttccctagcagtcaccagaccggccagtgctccctgttgataaggcacatgcgccctcgtgctggcaaagcctgggacggggtaccagaggcagcgcgtgtgtggctcctagggcgtggtctggggggccagctctctgcgatctggcgtggatttaaccgcaggtgaactttaccggatgataagttaacagagtatttgtgagacacgctatcttggatctgcagtgaggttcgaatctggctttctgctgtttctctgtttcattttgcaggtcgctatttatgcagagcgcatgcggggactccaggtcgggtcagcttgtcagccgctgtgctcttattcactggtttcgccggattgttatgtctacagacatatggttatagacataaaatcactg

SEQ ID NO: 2369 - DNA, 383 bp, Chlorella vulgaris
cggacgcgtggggtctttctgcaccatggcgtttgcgatgaagtctcaggtcagcgtgcagaaggcttccttcgcgaagccggccctcaaggcctcctgctccaagcgggtggcactggctcgccccgtgagctgctctgctcagaatgagaaggccaccgccgtggctgccgccgctctggccgttgcccttggctttggccagtttgacgctgcctatgccgacgttgcaggcctgatcccatgcgcggagagcaaggccttcgccaagcgcgagaagaatgaggtcaagctgctgacaaagcgcttgagaccttaggatgactactctgcgcccgccctggccctctaagccaccattgacaaaacccaatgcccctttg

SEQ ID NO: 2370 - DNA, 435 bp, Chlorella vulgaris
  unsure (1)..(435): unsure at all n locations
ggaggggtaggtgagtaagcagcacttctgcggcacgaatgtatggtgtcttgatgagaaaattgtttggggtgcaaggtttcgctcagcaggctccggcctggtctccatgtatgcatggcatttggtgcagctccggggctcagaataagatactgctgtgcttgttgttgcgcaagtgagcgctcttgaacatacgcgcgttggggtgcatactgcttcggttgcggaaggaaggattgcagtgccgctctttgcgcggaacgcgtgccggcccactggccaattctgtcaggcgttggtctatttgttcacacagtctgggaaggtacgcgggatggctagcacgtcttctgcggtangtatgcttgtcttccttgccttcaccacatcatgcactttcatgcctgggtatgacattttgtcactctggtg

SEQ ID NO: 2371 - DNA, 428 bp, Chlorella vulgaris
caacggcctccgactgacaagctttactcttgatgataccaacgaatgcatgctggggcgctggtgctgctcgtagcaaggcaaaggcgctgttgaatgaatgtctcgcttgctcgctctcttgctcggaggcattgctagtgagggaccagggtgggtgagggggcggcccgttcccttgcgcaccctgcgacgctgtttatgcttttcatggctgtacagaggcacttggcagttcctacggcacgcattgattggtgttcaaattggctgggagccggtactagggcgcacacatattctgaggagctgggttttagtgagagaccgttggtcggccgagtgtctgtcttccgcgcatgcattttccatctctcaagctttgagcaacgtgcagccgccgagcctttgcagcgggtatgcctgac

SEQ ID NO: 2372 - DNA, 424 bp, Chlorella vulgaris
cacaggcgtacgcactactaatgtgtctaaagtcgctgatcgaggagaccagatatatctcagccatctcggagatagactcacatgacgtgaacttagttcatccatgggctgttcaacggtgcagttggttaatccgagaatgacaacctggcaataatgttgtctggtgtggcatctggtgagtatctaagacggtcatgagtcaaatgtcgtgaagcgacccagcagattatgtcctgcaggaagtcaaggccgagcttatcgactccgccttccccctggtgcatgggattgtggcgaccaccaatgtcgaggaggcgtgtaaggacgtggatgtggccatcatggtgggaggcttcccacgcaaggccggcatggagcgcaaggatgttaagggtaagaacgttggcatctacaagag

SEQ ID NO: 2373 - DNA, 236 bp, Chlorella vulgaris
acgcgtccgctacggcctccgactgactagcttgactcttgatgataatagcgaatgcctgctggggcgctggtgctgctcatatcaacgcacatgcgctgttgattgattgtctctcttgtgcgcactcgtgctcttatgcattgctagtgtgggatcatggtgggtgtggtgtcgttttgttctcttggacatcctacaacgctgtttatgcttttcatggctgtatagaagca

SEQ ID NO: 2374 - DNA, 411 bp, Chlorella vulgaris
cccacgcgtccggtgcgtgcagcacctctctggtggaatgtgggtctactggggtgaacctctacgggtatgatttggtggatctggcccttggcggtgaaaaggactgacgtgctggggtgtgatgtcatggctcgctggttgcccgtcggcggtatgtggcctgtcacagcgtgggccacaacattgtgtttgaaactaatttgcctcgagtcttgttgagaaccctctgtttcctcagttatgtgagttgcttgcgcgttggtaagaaagttgtaagtttgctaactgttgtggggggtaaggctgggctgcctggggcctgtccttggatcgtcaggagctgcgcagcaggtgactgcttacagaaatcactagacgcactgtgtcactgtcgtgcttgtatgaaat

SEQ ID NO: 2375 - DNA, 425 bp, Chlorella vulgaris
agggatgcggcgtgaatatgcctaacatcggctatggcaccaacaagaagaccaggcacctcctgcccaacggcttctacaagtttgttgtgagcaacgtgaaggacctggagctgctgatgatgcacaaccgcaagtactgcgccgagatcgcgcacaacgtgtccaccctcaagcgcaaggcgattgtggagcgcgccggggagctgaatgtcaagctcaccaatgccggcagcaggctgcgtagccaggaggacgagtagccgcctgggcctcagcagcagcggcggtagcagcaacggcggcagtgccagcgtatcagccattgcgttggcacagctgctcgatagatgtaatccaaccctcgagtcaaaaaaaaaggagcggcagcgggatgaggagaaggaacaggggcgccagactgc

SEQ ID NO: 2376 - DNA, 440 bp, Chlorella vulgaris
cggacgcgtgggcaatacagaagcaatcatggcggacgcaggggagcacaaaaagaggacgttccgcaagtacacctaccgtggtgtggacctcgaccagctgctggacctcagcactgacgagctaatcgagctcttccccgctcgtcagcgccgcaggttccagcgcggcctgaagcgcaaggccctggccctgatcaagaagctgcgcaaggccaagaaggaggcgcccgctggcgagaagcccgagccggtgcgcacccacctgcgcaacatgatcatcatccccgagatgatcggctccgtcgtcggcgtgtacaacggcaagaccttcaaccaggttgagatcaagcctgacatggttggcacctacttggctgagtactccatctcctacaagcccgtcaagcacggcaagcccggcattggtgccacccact

SEQ ID NO: 2377 - DNA, 431 bp, Chlorella vulgaris
gcgcggcagtcacaatggcgaggaccgagcagacttttgtgatgctgaagcccgatgcggtgcagaggaacatcatcggcgtggtcattgatcgcttcctgagcaagggctacatcctacgcggccttaagttcatgaacgtgactaaggatcatgctgagcgccactatgctgacctggcctccaagcccttcttcccaggcctgatcgagtacattaccagcggccctgtggtggccatcgtgcttgagggcaaggacgtggttgtccaggcccgcaagatcatcggtgccaccaacccgctggcctccgacccctccaccattcgcggccagtatgccatcgacgtgggccgcaacatcatccacgggtccgactctgtggagaacgcgcagaaggagattgccctgtggttccccgagggccttgtg

SEQ ID NO: 2378 - DNA, 422 bp, Chlorella vulgaris
  unsure (1)..(422): unsure at all n locations
ggtttctacccaggcccactcccccaggcagaaacaagatggtggctctccagattctcgcagcgactgccaagggcaccgtcaagggtaccgttaagggtaccgcaaagcaggcagcgaagaccgtgaagaaggcggccatcaagaccgcaaagaaggtcgcccccaagaagggtggcgtggagtggtacggccccaacaggcccctgttcctgggcccctacagccccgagcccccgagccacctgaagggtgagttcgctggcgactacggctgggacacctccggcctgtccgccgatcccgagaccttctcccgctacagggagattgaggtgatccatgcccgctgggccatgcttggcgcgctgggctgcgtcgtgcccgagctgcttgaccnagacaaccacgtgccctggttc

SEQ ID NO: 2379 - DNA, 394 bp, Chlorella vulgaris
cccacgcgtccgcccacgcgtccggcacctaacacacgcaccaggcaccatgctcatctccaagaagaacaggcgtgaggtgtacaagttcctcttcaaggagggtgtgctgtacgcggagaaggacttcaacctgccggagcaccccgagattgagggggtgtccaacctggaggtcatcaagctgatgcagtccatgaagagcaaggacttggtcagcgagcgctatgcctggcgccactactactggttcctgacggacgcgggcatcgagcacctgcgtgagtacctgaacttgcccagcgagattgtgcccgccacactgaagaaatcgaccaggcctctggagcgggagggcgcacgcccgccgcgcggcgacaagccgccccgccgc

SEQ ID NO: 2380 - DNA, 364 bp, Chlorella vulgaris
cccacgcgtccgagcaggggtgaaacatggcacccaagaagaaggttgcggcccctcctgccgcggtcaggaaggccgctcagccggccaagcccgtgaaccccctgtatgagaagaggccgaagaccttcggtatcggtggtgccctgccacccaagaccgaccttcaccgctttgtgaagtggcccaagtatgtgcgcatccagaggcagaagcgtgtgctcaaccagcgtctcaaggtgccccccgcactgaaccgcttcacccgcacgctggacaagaacatggcccgagagcctgttcaagctgctgctcaagtaccgccccgaggacaaggcagccaagaagcagcggctgctggctg

SEQ ID NO: 2381 - DNA, 426 bp, Chlorella vulgaris
cccacgcgtccggtagaacagagggtctttcaccatggtgacgcctctcatcaaggtgaagagcgtcaagaagcgcactaagcgcttcaagcgtcaccagagcgaccgtaagatctccgtcaaggagagctggaggcgccccaagggtattgactcgcgggtgcgcaggaagttcaagggatgcggcgtgaatatgcctaacatcggctatggcaccaacaagaagaccaggcacctcctgcccaacggcttctacaagtttgttgtgagcaacgtgaaggacctggagctgctgatgatgcacaaccgcaagtactgcgccgagatcgcgcacaacgtgtccaccctcaagcgcaaggcgattgtggagcgcgccggggagctgaatgtcaagctcaccaatgccggcagcaggctgcgtagcca

SEQ ID NO: 2382 - DNA, 430 bp, Chlorella vulgaris
cccacgcgtccgcccacgcgtccgcccacgcgtccggtttgttggggtttggccggctgctgcatgcactgggcatctactattcccaccatgcttgcctgccagctcccggcccttatcaagcctccttgtggcagcagcagcagcacccccaacttttgtagtgcggagacgtgcgtgtgtgtgtgttatggggcggggggccgtaggttggggcgcccaccacgggctgcgccacatgtgttgctgccttctgttcttggtccctggctagtggcctcgcgacggatgcttctagtgtcctgctagcaccgcatgcacttactatcttgtccattacattgtagcatttgtgcttttccagcgcaccttgccgttactggtccagtgtcctcgctcagttggaacctatagaattgggtctggtggg

SEQ ID NO: 2383 - DNA, 435 bp, Chlorella vulgaris
ctcgtcttcgtcacaagtaaaacatgcagaccgccatgtcccagagggcttttgtcgccgcacagcccgtgcgcgctgcccccaaggccacccgcgcagccaggtgcgctgtggtgctgcgcgcctccgctgaggagtctcgccgcgcagtgctgggcggcctgctggccggtgctgtggccctgaccgcgggcgccgccaacgccgccaacgacattatcgatgaccgcaaggccatcgagaagggcttcaactggacgtatgaggcacgcgacaccgacctgccccagaacgtgcgtgacggtctgacccaggcacgcgccgaccttgagggcctcaagaagcgcattgccgtcagcgagaagaagatcgacacggagctggagtcctacatcaagaagaactactggactgaggggcgccagcagctgcgcc

SEQ ID NO: 2384 - DNA, 429 bp, Chlorella vulgaris
ccctccctcatccacgcacagtccatcgtggccgtgctgctctcccagattgtgctgatgggcctggttgagggctaccgcgtgaacggcggccccgctggcgagggccttgacgccctgtaccccggcgaggcctttgaccccctgggcctggccgacgaccccgacagcttcgcggagctcaaggttaaggagatcaagaacggccgcctggccatggtgtccatgcttggctttggcgtgcagggcctgctcaccggcaagggccccctggagaacctggctgaccacctggctgaccccaccgtgaacaacggctttgccgtggccaccaagttcacccccggcaactgagctctagaacctggctccgcagcagtgatttgaggcatgcccaaacccatgagccgctccacaaacttgtgtacc

SEQ ID NO: 2385 - DNA, 387 bp, Chlorella vulgaris
cggacacttgggcggatgcctgggcggacacgtgggtatgactatgatcccaggcctgagacgcgcgaggctgagttcactgatgccgcccgcaacccccgcaactgggtgtgagctgggatgtagtggctggctgtggcttgccaggcatagtgtgactggccttcttcccggatcattctcgagcgcagcagtgagcgcaacggcacattgccggctgacgcgtttcgatgctgctgccggtctgggttcgctggaagggctagtgcctgggttattgttgggttgggaaaggggagacataggacctgcactggttttcccccatatgcatggactcccctaaggctcgcattggaatatggctccgtagcgccatggcgaaag

SEQ ID NO: 2386 - DNA, 422 bp, Chlorella vulgaris
agggatgcggcgtgaatatgcctaacatcggctatggcaccaacaagaagaccaggcacctcctgcccaacggcttctacaagtttgttgtgagcaacgtgaaggacctggagctgctgatgatgcacaaccgcaagtactgcgccgagatcgcgcacaacgtgtccaccctcaagcgcaaggcgattgtggagcgcgccggggagctgaatgtcaagctcaccaatgccggcagcaggctgcgtagccaggaggacgagtagccgcctgggcctcagcagcagcggcggtagcagcaacggcggcagtgccagcgtatcagccattgcgttggcacagctgctcgatagatgtaatctaaccctcgagtcacaaaaattctagaaggtagacgacagcggcaaagtgaagcgcctgcgcaa

SEQ ID NO: 2387 - DNA, 430 bp, Chlorella vulgaris
ccgcgaggttgaggtcatccatgcccgctgggccatgcttggcgccctgggctgcctgacccccgagctgctgcataacgccggcgtggccagcttcggcgacgctgctgtgtggttcaaggctggtgcctccatcttcggcgatgatggcctgaactacctgggcaacccctccctggtccatgcccagtccatcgtggccaccctggccgtgcaggtcatcctcatggctcaggctgaggctttccgtgtgagcggcactgccccctggagcggcgaggagctcgacaccctgtaccccggtgatgcctttgacccccttggcctggctgacgaccccgacacctttgctgagctcaaggtcaaggagatcaagaacggccgcctggctatgttctccatgttcggcttcttcatccaggcacttgtg

SEQ ID NO: 2388 - DNA, 434 bp, Chlorella vulgaris
cttttatgtacatggtaacaaagcaatagcgaaaagattaaatcgcttcgctaaaaaaagctggctttttaagaagttaaaaagatgctaactaattagagaaacagcacatgaggaagatagctatataaaaaacatgtgttttcaacgttatgagaattaaatgaatcttaacaaaggttttttttaatacaaacaaaaaaaatatagctttctttgttttataaaagaggcatgtttttgaaagagaagccaaaaatataacttaaggtaaaaaagctggctgtaactatctccctatgcgtcgcttaaaaaaattttatagtataaaagagataacacacgttttttcacagtttaatgttttacgaaaattttcacaatgtaaagtcacgctgtcctttttaagtcttaaaaaagcttaaaaccgttaa

SEQ ID NO: 2389 - DNA, 432 bp, Chlorella vulgaris
cccacgcgtccgaacaggtccaaggttcacaagatgcagaccctctctgcccgtttcggcgtccgcgcccctgtctcccggggcacccgccaggtgacccgcgcctccgtggagtggtacggccccgaccgcgccaagttcctgggccccttcaccaaccccccttcctacctgaagggggagttcgctggcgactacggctgggacacctctggcctgtccgccgatcccgagaccttctcccgctacagggaggttgaggtgatccatgcccggtgggccatgcttggcgcccttggctgcgtcgtgcccgagctgctggaccgcaacggcaccgtcaactttggcgagaacgccgtgtggttcaaggccggtgccgccatcttcggcgatgacgggctgaacaacctgggcaaaccctccctcatccac

SEQ ID NO: 2390 - DNA, 74 bp, Chlorella vulgaris
ccaacgcgtcagacgaggcggtggaaggagtgttgcaatccctcagggacactacccgttcagcgtcggacccc

SEQ ID NO: 2391 - DNA, 339 bp, Chlorella vulgaris
cccacgcgtccgacgacgcgtcggaggacgtgttggctgctcggaaagtcgtcatacgaatgcgcgatcatgcctaggacggatctccgcgttagtaagcaacattgctgtggagcaagatgtcctttgggtttagaaggtgctccttgggcaactcgtagggtgcacctgcacaaagtagggccgacaggaataccaagcatcggaagcgctgcacaacaacgtcattgtagttatctaacgggccaaaaagcctgcgaggtggacccttccggtaacacacaagtgaatcccaaagcttttaggcggcctcacctcgggctgttgcaaatggcagtc

SEQ ID NO: 2392 - DNA, 313 bp, Chlorella vulgaris
cccacgcgtccgcggacgcgtcggcggacgcgtgggatgctcgcacaatcgtccaaggacagctgaaccgtgcctacgaccgagtcacgacgtctgtaagcaacaatgccgtgtaacaggagctcgttgcggcatctgaggtgctcattgtgcgactcttaggctgcacctagataccgaaggcggtacatgattcgcatgcagagtaggaggggatcatcaccgtcgttacagggatctaacggaccaagttgccagcggggtgcacccatcgcgttacaaacaggtcactcgaaagggttctggccgccat

SEQ ID NO: 2393 - DNA, 405 bp, Chlorella vulgaris
cccacgcgtccggtgccgaggcgcatttcacattggacatcctaattaccatctaaagtacgatgacttctgccaagttcgaccttgatcactctcacacttcaacatgaagctagcgaagggccccagcaggcgtcaccaatgcaggcagcacggataaaaacatagtagttgcacttttcaactgctacagaggaccagcagggacagacgatgtcatacggcctgaaggcattgagaagttttgctccgacctcaagctggagcccatcgaccgcaacgtgctgctcctggcatggcggtttggcgccaagcgcatgggcttcttctcccgagaggagttcttggacggcttcaaactcaggaactccagcagcgttgcgcagctactcaatgcgttgccct

SEQ ID NO: 2394 - DNA, 430 bp, Chlorella vulgaris
  unsure (1)..(430): unsure at all n locations
ggtgcattgctttctgtgcctactgccccacaaaagcggccatgtgcttcttgggcagcggggggttcccagtagagtgctggggtcctctgttggtctggccactgtgcagagcaccgcttgcggcactgcaaactgtttctccaagcactgcttttcagtggggtgagggctgtgtcagttggttcaagaaatacaaacgaatacacatcgaatggatgcattgatctttgctttaacaagtgctgggcctaactcaggcgttggctgcctttcattcagcctgctcaccccatccagttttgtgcatgcatgggtctcctgaggcgttgctgcatccttactagttctgcttggacgtangcggggcctggcatctgtgtacatagtactactactagttgcaatctgtcagccttcgttttgtaac

SEQ ID NO: 2395 - DNA, 339 bp, Chlorella vulgaris
gcgatgcgcaacgtgtgatgttctctggtcgccagctggaggaggaggcctccctggccgcctgcggcgtgtctgacgacagccagctgtacatcctgatgcgcctgctgggtggtgccaagaagcgcaagaagaagacctacaccaagcccaagaagcagaagcacaagcacaagaagattaagctcagggggctcaagttctacaaggtagacgacagcggcaaggtgcagcgcctgcgcaaagtttgcccccagttcggccccggcatcttcatggccacgcacttcaaccgcgtgtactgcggcaagtgccacctcacctacgtctatgacaaag

SEQ ID NO: 2396 - DNA, 413 bp, Chlorella vulgaris
agcggcttcacaatgtcgaagcggaccaagaaggtcggcattgtgggcaagtacgggactcgctatggtgcgagtctgcgtaagcagattaagaagattgaggtcagccagcattccaagtacttctgcaccttctgcggcaagttctccatgaagcgccaggctgtcggcatttggcagtgcaaggcctgcaagaagacccttgctggtggcgcctacgtgtgcaacaccgccgccgccgtgactgtccgctccaccatccgccgtctccgcgagcagattgagaagtaagcagccaaacccagaaaggcagccgctacatcagcagcagcccaaccactagcccagcgtgcaggcgccgtggatgccagtattttggggcgccgaccatgacagccttgggacagcttgtg

SEQ ID NO: 2397 - DNA, 423 bp, Chlorella vulgaris
agcggcttcacaatgtcgaagcggaccaagaaggtcggcattgtgggcaagtacgggactcgctatggtgcgagtctgcgtaagcagattaagaagattgaggtcagccagcattccaagtacttctgcaccttctgcggcaagttctccatgaagcgccaggctgtcggcatttggcagtgcaaggcctgcaagaagacccttgctggtggcgcctacgtgtgcaacaccgccgccgccgtgactgtccgctccaccatccgccgtctccgcgagcagattgagaagtaagcagccaaacccagaaaggcagccgctacatcagcagcagcccaaccactagcccagcgtgcaggcgccgtggatgccagtattttggggcgccgaccatgacagccttgggacagcttgtgctttggcctg

SEQ ID NO: 2398 - DNA, 399 bp, Chlorella vulgaris
gttactggcatcggatcggctggtaagatggcgaccgagatgaagttgttcggcaagtggagcgtcgattatgtggaggtgaacaacatctcccttgaagacgacattgccgtgaagcccaaatatgcgcgcttcacaccccaatcagccggacgtttccagaagagccgcttcaggaaagcgcagtacgccattgacgataggctgagtaaatcactgatgaagcatggacccaataagcgcagtaagctgatagtggtaccccatcatcatcatacctttgacattcatcaagctgctcacgcggcaagatacccatccagcgtcctggaggacgccatcatcaaccagtggtccacgtgaggatgccacccgcattggctccgcctgtgtggtgca

SEQ ID NO: 2399 - DNA, 330 bp, Chlorella vulgaris
gccaggcatcgacttacgcttgagccgagcctcttgactccggcaacatcattaaccatatgcaccagacacgatgcacatctcgacatatcacaggcgtccagtgtcgtagttcctcttcaatgaaggtgtcctgtacccgcagtaagacttctagctaccagcataacccgataatgatggggtgttcacactctaggtcatttggctgagtcagtctatgctaattcaagccttggacaaccaacttcaagtgtgccaccattaatactgagatccgatggacccttgtatccaacaacgctcttattaccgcatcttgcgaatcga

SEQ ID NO: 2400 - DNA, 422 bp, Chlorella vulgaris
cccacgcgtccggcaggacggcagcagcagcctggcaaggcgctgggcacgctgccaagtcagcggcggcccctgaaaacagtgagcagccgccggcttgaagtgaagtgagcgcctcaagaaagtggctgtgtggggtacttaacatggcatgtgtaacgtttcgacagggtggcaggagtacttggtgacttgtatcctacaatccctttgtcaactggcttggaccctagcgtccgtcgaactaggtgaggactggtagtacttcagcactttctgtttgaacctgcgtagctctggcaggcgggcgtgtagtacctgtgcctgtagtacttggaaccgcaagccggtgtattccatttgtgtagtgtacagtcgtatacgggcggacaagcatcgcgccggagggcacctgtgaatgt

SEQ ID NO: 2401 - DNA, 435 bp, Chlorella vulgaris
agcacgcccgcctgctctgagcgctgcgcccgctgcttgccggcttgtaggctgagctgctactttgtgtgccttggaggctgcggctgcgctcgaggcagtggagcagcagcagtaggcagctgacatttgagcatggccgctgctcgctcccctgccaccgaaagtctgtcgttgcaggtttttgctagctagcttgtaggtgtacgctttgcctcgcgctgctcggcggctggctttaacagaggccaggcgcagggcagccgtgggtatttggttctacatttcgtggggtcgcggatgggcacggtgagggggcatgggattgaaccttgtccccccgccctccagggcctggtgtaggcatcctttttcaacgagaagagcattttccctgaactgacgctggaggccaaacatgccagtcatgtgacg

SEQ ID NO: 2402 - DNA, 436 bp, Chlorella vulgaris
gtcgacaacaggtccaaggttcacaagatgcagaccctctctgcccgtttcggcgtccgcgcccctgtctcccggggcacccgccaggtgacccgcgcctccgtggagtggtacggccccgaccgcgccaagttcctgggccccttcaccaaccccccttcctacctgaagggtgagttcgctggcgactacggctgggacacctctggcctgtccgccgatcccgagaccttctcccgctacagggaggttgaggtgatccatgcccggtgggccatgcttggcgcccttggctgcgtcgtgcccgagctgctggaccgcaacggcaccgtcaactttggcgagaacgccgtgtggttcaaggccggtgccgccatcttcggcgatgacgggctgaactacctgggcaacccctcgctcatccacgcacagtcca

SEQ ID NO: 2403 - DNA, 429 bp, Chlorella vulgaris
cccacgcgtccgaaatgaagaccagcgacgtgcgcgtggacgtcaagctgaacaaggccgtgtggagccagggcatcaagaacgtgcccaaccgcctgcgcattgtgatccagcgcaagcgcaacgaggacgacgacgagaaggaggagatgttctccctggtcaccctggccgaggaccagagcagcaagggcaagggcgtggtggtcctggaggcataaacacacacacgcgcctcgcggggggagctgccgcagcagccagctggcaggttccgtgcctggggatcgcgctgggcctcgcgtgggccttgcctttcaaacggttggtgtgggcggcgtttctggcggcgtttagggtctcttgcagacccttggtcgttgtgcaggccccagatgtcgctgtatcgaacccagctggcggtgccct

SEQ ID NO: 2404 - DNA, 405 bp, Chlorella vulgaris
cccacgcgtccggggcgtggtggtcctggaggcataaacacacacacgcgcccttgcccttgctgctctggtcctcggccagggtgaccagggcaagggcgtggtggtcctggaggcataaacacacacacgcgcctcgcggggggagctgccgcagcagccagctggcaggttccgtgcctggggatcgcgctgggcctcgcgtgggccttgcctttcaaacggttggtgtgggcggcgtttctggcggcgtttagggtctcttgcagacccttggtcgttgtgcaggccccagatgtcgctgtatcgaacccagctggcggtgccctgttgcggtgcttctggctcactgtggttctgaggcagcagtggcagggttgccagagtgtgtcctgcacctgtccg

SEQ ID NO: 2405 - DNA, 401 bp, Chlorella vulgaris
cggacgcgtgggcggacgcctgggaaaacggcagacaaaatggatacgcccgtgaagctggacaacgtgatgaaaggtcatcggcaggactggcagccgtggtcaggtgacccaggtgcgcgtgaagttcctggataaccaggaaccgcctgatcatgcgcaagctcaacgggcccgtgcgcgagggtgacatcctgaccctccttgagtctgagcgcgaggctcgtcgcctccggtaatgcgggaggagctgggggcgctggcgcaagatgtgacccctgcgcgcctggaacaacagtgtgtggatggcgtgcaccgtgtaccatcagcactggcagagggcggctgggtgggcccctttgtgtgcacctgagacgtgttgagcatttgcaagcggcaac

SEQ ID NO: 2406 - DNA, 427 bp, Chlorella vulgaris
agcggcttcacaatgtcgaagcggaccaagaaggtcggcattgtgggcaagtacgggactcgctatggtgcgagtctgcgtaagcagattaagaagattgaggtcagccagcattccaagtacttctgcaccttctgcggcaagttctccatgaagcgccaggctgtcggcatttggcagtgcaaggcctgcaagaagacccttgctggtggcgcctacgtgtgcaacaccgccgccgccgtgactgtccgctccaccatccgccgtctccgcgagcagattgagaagtaagcagccaaacccagaaaggcagccgctacatcagcagcagcccaaccactagcccagcgtgcaggcgccgtggatgccagtattttggggcgccgaccatgacagccttgggacagcttgtgccttggcctgtgag

SEQ ID NO: 2407 - DNA, 421 bp, Chlorella vulgaris
  unsure (1)..(421): unsure at all n locations
gttgttggctcttgtaatgctggcgaggagcgagtcactgatgagtgcggctgcagcacatgcacccctaccagccctgcgcccccaggagactgcccggatggcaacactgtcaactgcctggttgacccgtgcgccgcaaccacatgtcctgtgggccagcagtgtgtgtccaactactgtggaggctgcaacgcagagtgcagggacctaggaggggacccgggagggtgcccagagggcaacactgtcgactgcttggaagacccatgcgccgaaataaaatgtggcggggggctggagtgcgtcacgaactactgcggtggctgcttcgcagaatgcaaggacctanggggaggcagcggctctccagcacaagccccaccggccgtgactttgcaaggtttagaggggtttgccg

SEQ ID NO: 2408 - DNA, 327 bp, Chlorella vulgaris
cacacgcgtcggcgacgtgcactcaacggtcgccatacagggccgcgacggcttcaagctggcaacagacaaggtgatgcaggtcacctatgctcggcagtagttttgtcctgctatgcagccgctgcaactgtgtgggcctgctgctaccttgtcaacactttcgcaaccttcgcacggctaataagttacattaagggttgcagccagcttgtacatagtttcgggggtgccggaagtcaatgatcgacatcatgtaaaatggtcacatcattttccgtttgaaccttcctacctctgacatgcgcccgtgtactacaaatgggc

SEQ ID NO: 2409 - DNA, 427 bp, Chlorella vulgaris
cccacgcgtccgcccacgcgtccgcccacgcgtccgcgaaggcctgcatatgacctactttggcactggttgcatcttccactatgacgacgacttcccccagggcagcggcaagggcttcaaggaggccgacaagcccaacttcaccggctcctactactcctacaccaaggccatgctggagtcgctgctgcgggaataccccaacgtgctgatcctgcgcgtgcgcatgcccatcgtccaggacctcacttatgcccgcaacttcatcaccaagatcatcaagtatgagaaggttattgacatccccaactccatgactgtgctgcccgagctgctgcccctggccattaagatggccaagcgcaacctgacgggcgtcatgaactacaccaaccctggcgccatcagccataatgaaatcctg

SEQ ID NO: 2410 - DNA, 417 bp, Chlorella vulgaris
cccacgcgtccgcccacgcgtccgcccacgcgtccgctcaagaacttccacaagatccagcagcgcctggtgcgcgagctggagaagaagttctccggcaaggacgttgtgattgtgggcgtgcgccgcatcctgccaccccccaagcacagccgccgggtgcagcgcccgcgcagcaggacgctgaccgccgtgcacgaggccatcctggacgacctcgtcttccccacagagattgtgggcaagcgcctgcgctacaggcttgacggctccaaggtgcttaaggtgctgctagaccccaaggaccgcaacaccaccgagtacaagacggagacctttgccggcgtgtacaagcgcctgaccggccaggacgtcacatttgagttcccggtccaggagcagcagtgatgaatcatg

SEQ ID NO: 2411 - DNA, 396 bp, Chlorella vulgaris
cccacgcgtccgcccacgcgtccgcggacgcgtgggtctggcgttaaccaaagagggaccgggcaagctagttgccgtggttgtacgcccagcgtattgcaaggcgtaccagcagcacgctcgggacagttctaggttgcaaagcccaaacgactctccctaggatgcctgcccccatgctagctagtcgtctgactatgggcacatgcgctgctgactatgaggcctgcacgtgagccttatattgcagttgagccctcagtatggcccctactttgtgcacgtgtgtgccggaagcggctggtgtgcccagcccgttttgcatttagccccttgctgttgacctcgggcaagcgatctcgcaacatgctatttgttaagaaaaggttgcggata

SEQ ID NO: 2412 - DNA, 428 bp, Chlorella vulgaris
gcaactgatgcacgccgggaatcgagttggccttgagccgacgcgtttgacgcccgcagcagcacctaacacacgcatcaggcaccatgctcatctccaaaaagaataggcgtgaggtgtacaagttcctcttcaaggagggtgtgctgtacacggagaaggacttcaacctgccggagcaccccgagattgagggggtgtccaaactggaggtcatcaagctgatgcagtccatgaagagcaaggacgttgggagcgagcgctatgcctggcgccactactactggttcctgacagacgcgggcatcgagcacctgcttgagtacctgaacttgcccagcgagattgtgcccgccacactgaagacatcgaccaggcctctagagcgtgacggcgcacgcccgccgcgcggcgataggccgccccgc

SEQ ID NO: 2413 - DNA, 257 bp, Chlorella vulgaris
aaaaaacaaagccgtaagagtaatgttgagacgacaacaagagaagaaaagacgtgccgaactgggggactaatcgcgagaatttcccccgcataaacggaagttgaggtgatcaaggcccggctaagatatacttcaagggcctgtggctttgtcatgcccgagactgcgagacctcaatggcaccgtcaacttttggccagtaacgtcatgtggttcaaggccagtgccgccatcttcggagatgagcggctgaa

SEQ ID NO: 2414 - DNA, 252 bp, Chlorella vulgaris
acctgcgatagccgtaccacatcccggccgactacctggtgggcacaaagcgctttgtggggctgcagctggccgaggcgccgctgatagtgttcatcaatgccactaagatcaaaaaaaaaaaaaaaaaaaaaaaaaaaaaaaaaaataaaaaaaaaaaaaacaaaaaataaatacatttcaaaaaaaagctatacaatccaccattatcaaaatgcaataaaaaggcataaccaaattcccggataagcg

SEQ ID NO: 2415 - DNA, 439 bp, Chlorella vulgaris
acccttcctacctgaagggtgagttcgctggcgactacggctgggacacctctggcctgtccgccgatcccgagaccttctcccgctacagggaggttgaggtgatccatgcccggtgggccatgcttggcgcccttggctgcgtcgtgcccgagctgctggaccgcaacggcaccgtcaactttggcgagaacgccgtgtggttcaaggccggtgccgccatcttcggcgatgacgggctgaactacctgggcaacccctccctcatccacgcacagtccatcgtggccgtgctgctctcccagattgtgctcatgggcctggttgagggctaccgcgtgaacggcggccccgctggcgagggccttgacgccctgtaccccggcgaagcctttgaccccctgggcctggccgacgaccccgacagcttcgctgagct

SEQ ID NO: 2416 - DNA, 395 bp, Chlorella vulgaris
gcgtccgcgcaaccaaggcagtcgccagcaaggccgtctcaacctggggcaagggcgccttcccgaagcctcccatcgatgtgctgccccttctgaccgctgtgggcgtgggctgcgttgccgctgtgtggtccatgggccgtaacctggcagtcaaccctgaggtctgctgtacaaaggcctaccgtggtggtgacagcctttggaatgatgaggagattcgctccaagtctgaccagttcaggcccttccccttcattctgcgcatgatggccaagcttggcaaggccagcactccctctggcgagtggagccagtgaccgaccgccttgaacagccctgcagcatagcaagcaaagcaggcggtggctgagctgagataccaactgaccgca

SEQ ID NO: 2417 - DNA, 427 bp, Chlorella vulgaris
cccacgcgtccgcaatcatataatcgaacgatcaatgtaggccccggcaacctgctgacctggtagcaaacatggtgctccatgctacacttgagcaactgcctacgctagcaagatgcttcgccacccacgctagcaagcaagctcccaaagtcggggcagggatccccggggtgcagcacatcatcgcggtggcctcggggaagggcggggttgggaagtccacctgcagtgtcaaccttgcggtcgccctggccgagcacttggggctgcgggtgggcttgctggatgcggacgtgtatggacccagcatccccaccatgatgaatattcgagggaggccttcagtggacgaggacgagcgcatgctgccgctggtgaactacggtgtgaggtgcatgctcatgggtttcctcatggaccaaga

SEQ ID NO: 2418 - DNA, 398 bp, Chlorella vulgaris
cccacgcgtccgaatacatccagggcaatcattatgctgggcaccatgatcatgaccttctgcgccaacctgcgcagggctatgcccaaccagggcaagggcatacgccaggtgacacgcgcctcagtggagtggtacggcactcacagggcctcgttcctgggctccttctcttagggctccacccccagctacctgaagggcaagttcgcctgcgacaactgctgggacattgcaggtctgtctgccgatccccaaaccttctctgcctaccgctaggtttaggtcatccatacctgctgggcaatgcttggcgccctgtgctgcctgacccccgaactgctgcagaacaccaggatgaccaccttctgccacccttcaatgaggtttaagggtgg

SEQ ID NO: 2419 - DNA, 433 bp, Chlorella vulgaris
gccaccatggtgatcacaaaccccttgtgggtgatcaagacacggctgcagacccagaacatggggattcgcatgggcgccagtaagaacccagcaatgtacaagggcaccatcgatgccttcatgcgcatagccagggaggagggcgtggcggggctgtacagcggcctggggccctccttgatgggagtaatgcacgtagtcatccagttcccgctgtacgagggcatgaagagccacttcatccgtcacccgctgctgccgcacgaagggggcgagaaggagcgactgacaatgtttgagctggtgctggcgtccgctgcctccaagatggtggcatccacggcaacctaccctcatgaggtcatccgctccaggatgcatattgccggcactggcgctttctctggtctgatgcgcacctgccgccaga

SEQ ID NO: 2420 - DNA, 318 bp, Chlorella vulgaris
cccacgcgtccgccagattgcttactgtaaacaacagacactgctgaccatgcggagggaacaccctgagaagtgttttgtcattattgattgtgacggaggttccagtcctctgaacaaggaggtgtttggcaaaccagctcgtatggtgcaggtttgtatggaaggctacatggtgtacttcccattcgtgctttgacatggcagccctatattaacagcttattccaggcttctggtgtttggtgtgtgaagcacaagcaaagctcaggttcgaggcctgtttgtgggatgaagctgatgtaacattgtgtactc

SEQ ID NO: 2421 - DNA, 237 bp, Chlorella vulgaris
ggccgggcattcaagctctggcctaactctggcaccagcaatgcagagcccgaaggtctcggaattgcagcgtataccaacgcgctgggaattggcggactgtcttggtaggccgggctagatgccgttgcgtaaacccagggactttacttccggccgcccttctctaacccccccatgttgtccatcactgtatcacacggtttcagcgcttgaaattctcccgtcacatggagt

SEQ ID NO: 2422 - DNA, 430 bp, Chlorella vulgaris
acacgctcgaaagatgtcaccagtagagcatctgatagcattcacaccagcaacgtagtcatggctcgcggctggtgtgcggtcatactcgtagcactcgtattcgcggctctctcatcttgcaccgtttatgggcagcagcctggctttacggacgattggcatcaggatgcgcaacacggcctcattgagttcatacaggagttaagcagggagctccttcaacagcaacaactgcagggagctgggaccagcagcggagtggaggcagccttgacaccaggtggcatgcagcagctgacgtccttacactagaccagcggcgtcaatacgctcaagcgttaaaggttcgactgatggggtagttcctgcactgtcagatcggtgcgcctttggcttgccacctagttcacatccatgatgccactgg

SEQ ID NO: 2423 - DNA, 184 bp, Chlorella vulgaris
gagacatcaacatgtctgacggaggggacagtcccgaggccgtcttttcacttgtcgccgccgcggctcccgcccccggcgagcccatggacatcaacagcgccatccagctggtgctcaagaaggcgctggctcacgacggcctcgcacgcggcctgcacgaggcctgcagggccatttagcg

SEQ ID NO: 2424 - DNA, 221 bp, Chlorella vulgaris
gtcgaccacgcgccgggctgcgcagcacggtgcctgtggtgctatgggtaatcgtgactcaggtgggactgcttttgccaaagtgcgccatgacgcaatcttcttgtacactggggacagggtgagcaaagtctgcatgtctcggtggatcgggggttctgcaagagagtatctaaggatatcttatggtgacaaggctgacatgtctgacaaggctgtac

SEQ ID NO: 2425 - DNA, 334 bp, Chlorella vulgaris
ctttggtgaaacctaacgacttgcagcacgagcaagcggccttgaagaagcaactgatatacgtgcatgaattgaaggacagcttacatcatgacgaccgcgtggcatatcagactgtggtagcttatacatccatagtcgaccacctcatcaatgacgtggctctcgaagtgcacagggcaatcacaacacgggcggacaacctgttggatgtagcggagcggcagcagcacagccagctggcagcacctcccccccacccaacgcccagcggcagaagcctggtagatgtctttggcaaccaggtgccacccatagcgctagaccaagtctc

SEQ ID NO: 2426 - DNA, 367 bp, Chlorella vulgaris
gtcgacgcacgcgtcaggatcctcaagacttactatcagctgcatttcagccagtagaacagagcagtcatggcgtcccagctgcttgccacccgccctggcctccgtgtggcccctgccaccagcactcgcctgagccgccgctccgttgttgtgaaggccgccaacctgagcaccatcgagaagcagtacaaggagttcagggtcccccagatccctgtggccaccgtgtttggcattgccggctggctggtgcccgctgctagccccgcccctgccttcggcggtcgctctctcctgagtgtgttcaccgagagcatcggccaggagctttcccacttccccaccggccctgctctggactccc

SEQ ID NO: 2427 - DNA, 242 bp, Chlorella vulgaris
aatccctaactgcgtcccttggtggacgttcactctgtgcctgtcagccagcgtgcggctcttgccttgcacgcagcggtaacatacagcagcaggtgtgctgtcatttgtgggcgggtgtgctgtcgtgtaaccaagagcaaggtaaaaaacaaaaacaaaaaaaaaaaaaaaaaaaaaaaaaaaaacacaaacaacaaaaaaaaaacaaacaaagaagaaaaagcacagaaaaaaacaaa

SEQ ID NO: 2428 - DNA, 378 bp, Chlorella vulgaris
ctggcagcccctttcctccctcttcaacccctcaggttgtaaaaaagcgtcgccatggcttcaaaaaggaagggcggcgttggtggcaacaagttcaggatgtcgctgggtttgccagtggccgcaacaatcaactgcgctgacaactccggcgccaagaacctgtacatcatctccgtggccggctggggcgccaggctgaaccgcctgcccgccgccgcccccggcgacatggtgatggccaccgtgaagaagggcaagcctgacctccgcaagaaggtgcaccctgcggtggtggtgcggcagcgcaagtcctggaggcggaaggacggcacctacatctactttgaggacaatgcaagcgtcattgtgaacccc

SEQ ID NO: 2429 - DNA, 426 bp, Chlorella vulgaris
cccacgcgtccgcccacgcgtccgcccacgcgtccgcgtttgtaggcccatctgtagcggcagccaggcacgatggtgcagattggcaagaaggctgctagcggccctaagaagggcaagaaggccctgaccttcaccatcgactgctccaagcctgtggaggacaagattatggagattgcctccttcgagaagttcctccttgacaagatcaaggttgagggcaagacaggcatcctgggtgacaacgtcaaggttgtgcgcgagaagaccaagatcacggtgaccagcgagattgccatgagcaagcgctacctcaagtacctcaccaagaagtacctgaagaagcacaacgtgcgtgactggctgcgtgtgattgcgtccaacaaggaccgcaatgtatacgagctgcgctacttcaacatc

SEQ ID NO: 2430 - DNA, 390 bp, Chlorella vulgaris
cccacgcgtccgcccacgcgtccggcaagcctcgcgcttgtatgtgcgcaacgggccgggcagctgagcgtgtagtagattgctgggaattgtccgagtgttttggtgggcggggcctgtgaaggttgcttcaatggaggcaattgacttccttcctgccttgttttgcctccctactttgtcagtgagtgtatagcacgtgcctcgcccttgaagtggtcggtcacatgcggtactttgaccaccacttgccagacttggctgggacattgatgatgtctcggtgcttagttctggatgacggtggctgtgcaaaataagacagcttaatgttctgatagcttgaaagggtggttgcacttgatggcaccgttgtgggacgtggcccca

SEQ ID NO: 2431 - DNA, 337 bp, Chlorella vulgaris
ttgcaactccctatagtgagtcgtattataaagctcgatctggcctttgagcacctggagaacgactgctacattcgtgctgtccatcattgctagtgctgttcgagcttcgcacacaggcgcgtagcaagcaagcttaagacgagtccatacgtgctaagctatctcttctacgctcgtgcagcagatgcacagtgtaatagacgacggagaactacacatcctcttagcaccatgaggagacacagcggaggagactctgatgctcggccatgcaacagcatacattctgtgctcatgtggcctgcacgtttactggtccgcccactccgatcgc

SEQ ID NO: 2432 - DNA, 121 bp, Chlorella vulgaris
actacaccctatagtgagtcgtattaataaggtgcttccgcttctcctttgatacccccccgtaccatttctcatttcatgactgtccatggccgccatgtcctcttccaccttcacacac

SEQ ID NO: 2433 - DNA, 361 bp, Chlorella vulgaris
gggccgacccacgcgtccagatctgcagtggttttgtgtgacccagttgtttggccactgcctctgttaagtcgcaagtcttgcagttgctgacaagggctgcagccatattgtttgtttgatggtggcgtggttgtcattgcgaattggggcgagatactgtgcagttacgctttttagtgtttgtcggcttgctcagagtgtgcgtgtgatgcagtatggtggtgcatcatgggtgcgtgaggagctcttcatctaaactgctactggctgttgtgcgcgtgttatgcatcgtgggtgcacaggagctctttgtttgaactgttgccggctgttgatgcagatagccatagtatttgac

SEQ ID NO: 2434 - DNA, 412 bp, Chlorella vulgaris
acgcgcgggacgatgcaagcatctacagtgagtcgtattaagggcgagttcggcggagactacggctgggacactgctcggtccgtctgccgatgccgagaccttcgctgcatagcgcgaggttgcggtcatgggggaccgctgggcgatgcttggcaccctgggctgcatgaccccggagctgctgcagaacgccagcgtggcgagcctcggctacagatgctgtgtgattaagggctggtgcctcaatctgcggcgatgatggcctgaactatgtgggaaagcgctcacgtgcccatgcacactgcatcctggctaccctgacagtacaggtcagactcagctggtcatgctgagggattccgtgctagagaaactgctccctaaagacgggaggagctcgacacgctgt

SEQ ID NO: 2435 - DNA, 115 bp, Chlorella vulgaris
ctactccctatagtgagtcgtattaaaggctagttcgccggagactatagatggtacactgccggtcagtctgcccatcgccatgctttcgcttgtcagcgtcaggttgctcgtc

SEQ ID NO: 2436 - DNA, 400 bp, Chlorella vulgaris
attcccgggtcgacccacgcatccacaccggcaacggcaacgagggcgagggcaacactggtgcctataacaagggccagggcaacactggtgccttcaacgagggcgagggcaacaccggctacaagaacgttggcaagggcaacactggtgctgagaacaacggcgagggcaacaccggcgacaagaacaccggcaacggcaacaccggctctgagaacaccggcgctggcaacaccggcgttaagaacattggggctggcaacaccggctatggcaacattggcgccggcaacagtggctacaagaacattggtgagggcaacagtggtgcggagaacgagggccagggcaacagcggcaacaagaatcacggccagggaaacaccggtaatgagaa

SEQ ID NO: 2437 - DNA, 321 bp, Chlorella vulgaris
attcgcgggtcgacccacgcatccacggacgcgtgggtttgcagcggtggtagtggcatctagggtgcttgaagggccaatccggtgcgcactgtaattgtatggccatgaaagcctatcccaacatcagcctgtgatagtgggtccgacggccatattttgtactgcattatagaagtgcctttcttgtgtctcaactaatggtgtggaggtgaggagagtgcgttgaagtaagtcttgggatcgcaccaagtccccaaaatattgagtttaggggcctcagggactcttgctaccggacccttgtaaatgggctgccag

SEQ ID NO: 2438 - DNA, 307 bp, Chlorella vulgaris
aacaccctatagtgacgtcgtattatgccgcccctcctgccacggtcatgaacgccgctcatccggccaagcccgtgaaccccctgtatgacaagatgcccaagaccttcggtagcgggggtgccctgccacccaggacctaccttcaccgctttgtgaagtggcccaagtatgtgcgcatccagaggcagaagcgtgtgctcaaccatcgtctcaatgtgccccccgcactgaaccgcttcacccgcacgctggacaatagaatgcccgatatcctgttcaagctgctgctcaagtaccgccccta

SEQ ID NO: 2439 - DNA, 418 bp, Chlorella vulgaris
tactacaccctatagtgagtcgtattaatgcgataatattacatgaatggcgtgatccacaactgctacaaagccctgcacaactgggtcacctcaaatgcttcggtgatatctatcctggggactcgtactcgcatcctttcacaacgccgacgctacagcgtccccaataacctacaatgcgttgatctgtctggccaggaccaccccctgacatgtgacccgcactcatgtatgcctgtcgaccagcaccagacctaacaccatcgtccaatatttgctatgaactgatcatcaacctccacggcgagcctcggggtcgagatgaatagcgttagccttgtccaagtttaacatcataaccgctgccctaaggacaccaattgcccacaatattcctaagggcctcaaattttta

SEQ ID NO: 2440 - DNA, 147 bp, Chlorella vulgaris
tttttttttttttttttttttttttttttttttttttttttttttttttttttttttttttttttttttttttttttttttttttttttttttatttattttttttttttattatttgtttttttattattttttttgtattgattt

SEQ ID NO: 2441 - DNA, 230 bp, Chlorella vulgaris
tactactcacctatagtgagtcgtattacgacgttaacgacaacagacggccatcgctcgcagacatgcatccaggccatcgacagttgaggtccatcgacaatcatcggtgagatccaacagagggcactcgtactcccagcctttctcaacgacggcgccaaagactgtccacatcgtcaaaacgcctggctctgtcctcccataacttcacattgagaggtaagcta

SEQ ID NO: 2442 - DNA, 78 bp, Chlorella vulgaris
tactactccctatagtgagtcgtattatttttttttttttttttgtgagatctcccggtctcaatttcttctattctt

SEQ ID NO: 2443 - DNA, 358 bp, Chlorella vulgaris
gacccacgcgtccaggcacgcctgtacagccagacaacaattacaagaaaaaggaggactcgggtcccaacaagcaacggcgttgccaagttaaccgccttcgctgccaatcctccggcgttctggtccccaaaggacaagccatcaagcgcttcattgtcaagaacatcgtggatgcctccgccatccgtgatatccaggacgcttgtgctattgatgggtatgcgctgcccaagctgtaccgcaaggtgtattactgcatcagcgcggctatccactccaagattgtgcgcgtgcgcagccggcaagacaggcgcaacagggagccgcctgcacgccctggtttccgggcccgccg

SEQ ID NO: 2444 - DNA, 201 bp, Chlorella vulgaris
aggcagctggctggtgctcagaggtcaggtgctgcgctgctactttcctgacagtcctggattgttgtttgtaacttgctccgcatcaagcataaaaaaaaaaaaaaaaaaaacacagggacaaaaaagaaaaatagaacaaaagaaaaaaatgtaaagaaaaaaaaaaaaggagggcagatcaaaaggttccaagcttac

SEQ ID NO: 2445 - DNA, 279 bp, Chlorella vulgaris
ctatagtgagtcgtattaaacgatgacattcattaggacgaactctggtcacagcaagcacggccgtggccatgtgacccgcgtgcgctgctaatcctctggcgtgcggggccctagggacaaggccatcaagcgcttcagtgtcaggaacatcgtgcatgcctccgccatccgtgagatccacgacccatgtgctagtgatgggtatgcgctgccgaagctgtaccgcaaggtgtattactgcatcatcgcgggtagccactccagcattgtgcgcgt

SEQ ID NO: 2446 - DNA, 66 bp, Chlorella vulgaris
ttactacaccctatagtgagtcgtattaaacgatgagggtcaataggaggaactcgggatcgcaac

SEQ ID NO: 2447 - DNA, 182 bp, Chlorella vulgaris
  unsure (1)..(182): unsure at all n locations
attactacaccctatagtgagtcgtattaaacngngngntnnnaatagtgtatacgtnagtaagacatatttttattaccttaatgtaatgttcgctcaagaggctgcacacctaccgggcgggcacggggcctcacagggctattaaagcgggaggaagcttcaattcacagaccctcggc

SEQ ID NO: 2448 - DNA, 329 bp, Chlorella vulgaris
acaccctatagagagtcgtattaagatgtcagtgttttttttggtcgaagttatgtttcgccatgatgctggcttcgctgggacgcagttccagtatcgtcattcgaggagagcttcgggggcatttgggttatttgagccgagtaggtttggtcaccagggaaattggtaactgctatcggatcgtgaaatgcatagacatcatgcttgtagagcacatcggcagcgatgatggtgatccggaggttcgccttggcatgtagattggtacgtatgctcaagggaaatacaacatgagggcgttggcacaaacgcaccggggattaacg

SEQ ID NO: 2449 - DNA, 118 bp, Chlorella vulgaris
gttacaacacactatagtgagtcgtattaaagcgttcttgataccatggctgagacgtcacgcataatgaggacacaaagtttcatgactaaccgagtgcattatcagagacaattta

SEQ ID NO: 2450 - DNA, 384 bp, Chlorella vulgaris
gggccgacccacgcgtcaagctaggagagatagtgacaacaaccccaacaattggtttaatggtgggaaattggattcaagattattaccttcaccgtgtggaactttggtgggcaggacaagattcggccgctatggcgccactacttccaaaacacccaaggcctcatctttgtggtggacagcaatgaccgtgaccgtattggggaggcgcgggatgagctgcatcgcatgctaaacgaggacgagctccgcgacgcggtgctgctggtgtttgccaacaagcaagatctgcccaacgccatgaacgcagccgagatcaccgacaagcttggcctgcactccctgcgccagcgccactggtacatccagtcctgctgcgcc

SEQ ID NO: 2451 - DNA, 156 bp, Chlorella vulgaris
accacgccttcggccaagccttcgggccaaaaaaaaaaacaagaaaacaatcaattaaaaaagatgaaaaagggtggcgtcactagaggattaacgcttaagttcccgttcaatgggatgtcatagctcttcataaattgtcaactacgttcagtt

SEQ ID NO: 2452 - DNA, 427 bp, Chlorella vulgaris
  unsure (1)..(427): unsure at all n locations
taccgatcaagaattcgcgggtcgacccacgcatccggcatcgagcacctgcgtgagtacctgaacttgcccagcgagattgtgcccgccacactgaagaaatcgaccaggcctctggagcgggagggcgcacgcccgccgcgcggcgacaggccgccccgccgcttcgacggcgagggccgcggcggctaccgctctgccgagggcaagactggtgcccctggcgagtatcgccccgagttccgtggtggctttggccgcggctctgcccctccccagtaagcagccaacaggacatggacgatgcagcggcggcccagcagggctagactgacatgtttggaggcaagcagggttacatgctagcaagtgcagggcatgctgcatgcagccgcagttcagcaggcatancagttgaatgacatgt

SEQ ID NO: 2453 - DNA, 299 bp, Chlorella vulgaris
  unsure (1)..(299): unsure at all n locations
ttactactccctatagtgagtcgtattaatgctatctatngctccttccgtgatcaaatcaagtattgtatctaattattgtggcatcttagctatatcttatgtaatatctaatcgaggggggctttcttttcagaaatgcgattgataaacgaggtgaattgatatatcttactaactttaggtagggaaatcaaacgagattgttagttagtgtcgagtaaataacatacgcctgactgcaaaacttgtttgtgtaagttggattaaattctgtctggttacacgggaaccttcct

SEQ ID NO: 2454 - DNA, 292 bp, Chlorella vulgaris
atagtgagtcgtattaaaccatacgcccacccccacacatgatgggccttggtcaatgaacacttccgactgcagcggtttcagtttgataagctttactcctgatgaggggaacgaatgcatgctggggcgctagtgctgctcgtaacacggcaaacgcgctgttgaatgcatgtcgcgcttgctcgctctcttgctcggaggcattgctattgatggatcagggtgagttcaggggcggcacgttcccttgcgcaccctgcgaagctgtttatgcttttcacggctgtac

SEQ ID NO: 2455 - DNA, 99 bp, Chlorella vulgaris
  unsure (1)..(99): unsure at all n locations
attactacaccctatagtgagtcgtattaaactttnttttttttcttcggggtccccttcctcacttgacgtacgcctcatgtccccgttgcttcccca

SEQ ID NO: 2456 - DNA, 418 bp, Chlorella vulgaris
  unsure (1)..(418): unsure at all n locations
ggccgacccacgcgtccaggccatcaactccgacgccggatgcaaccatttaacaagtggccggataacggcctggtggggaattggtcaagattctgcccgaacctgaaggaggcaaccaccaaggcaaaacattaactaagcacttttactcgcgccggtggtacaaaacaattgcaataaacagcgatgagatcctgtaatgcttaatgtgtggcgcgtgctggaaggcctttctactgcggaaaggtttctataagaacgagactgtagttgcttctgttgccaactagaattgcgacgctcacatttgcgatatcttgtgctccaagcatgaaagggcatgcagcagtggagcaaatangggcaattacttaaatacctcttttgtgaaaaaaaaaaagaaaaaaaagggcgg

SEQ ID NO: 2457 - DNA, 399 bp, Chlorella vulgaris
aattcccgggtcgacccacgcatccgcccacgcgtccgcttgtgctttcttgttaatagttatcgaggggacaatgcaggccactatgtcgagggtcgctctgggcagcatcgcgggcctgaggcccgctgctactgttcgtcccagggccagcaggacggtggtgagggccatggctgacaagccggcccctggcagcctgcaggttgtagcgcccatcaacggcgacccctacattggcatgctggagacccccgtgacctccgcacccctggttgcctggtacctttccaacctgcccgcctaccgcaccggcgtgtcccccctgctccgcggcgtggagattggccttgcccacggcttcttcctggtcggccccttcatcaagcttgggcctct

SEQ ID NO: 2458 - DNA, 181 bp, Chlorella vulgaris
aattcccgggtcgacccacgcatccacggacgcgtgggcggacgcgtgggaaaaaaaaaaaaaaaaaaaaaaaaaaaaaaaaaaaaaaaaaaaaaaaaaaaagggaagacggtcgacaggtttaaaggttacatgcgtatgtatgcgagcttataactctacaactcttccacctagtttc

SEQ ID NO: 2459 - DNA, 157 bp, Chlorella vulgaris
acaccctatagtgagtcgtattatttttttttttttttttttagtcttccattgcaatttccattagactaaccatatttcgtgcttagcataactcagtgggatacattcaaggggggcatgtcgtcatatctagtcctcaagggggggagtcctc

SEQ ID NO: 2460 - DNA, 93 bp, Chlorella vulgaris
  unsure (1)..(93): unsure at all n locations
tactacaccctatagtgagtcgtattatattttttttttttttttctctttctctcnttgtctcccatctgtctgcggctcgtcgtggtcctc

SEQ ID NO: 2461 - DNA, 424 bp, Chlorella vulgaris
  unsure (1)..(424): unsure at all n locations
cgggtcgaccacgcgtccgatcacccgtcgacaacaggtccaaggttcacaaagatgcnagacctccctgcccgtttcggcgtccgccgcccctgtctcccgggggcaccgccaggtgacccgcgcctccgtggagtggtacggccccgaccgcgccaagttcctgggccccttcaccaaccccccttcctacctgaagggtgagttcgctggcgactacggctgggacacctctggcctgtccgccgatcccgagaccttctcccgctacagggaggttgaggtgatccatgcccggtgggccatgcttggcgcccttggctgcgtcgtgcccgagctgctggaccgcaacggcaccgtcaactttggcgagaacgccgtgtggttcagggccggtgccgccatcttccgggatgaccggctg

SEQ ID NO: 2462 - DNA, 79 bp, Chlorella vulgaris
actactccctatagtgagtcgtattattttctttcattctactgtcatacctcttctatattgtcacctaaattcaatt

SEQ ID NO: 2463 - DNA, 107 bp, Chlorella vulgaris
attactacacccaatagtgagtcgtattaaatgttttttttttttttctttcctcttcttttgtgtctgttcgtttctgctctctggccgtctttttcgtcgcgctc

SEQ ID NO: 2464 - DNA, 293 bp, Chlorella vulgaris
atagtgagtcgtattatgtatgtcacatctctattccaccatatttcattcctctttccattcacttctgttcttcgcatattccctctctcgtcgctctagctcaggggctagcattacatatcgcactctagacggtgttatcttcatcctttgtgattgtttgcggctttcctctgtgtcggcaatatctaactctctgagtgatcagttaattggcttcgcactgcctgcgtcaaggtggatctgtgagacatagggttttcggagctttagctacagattaggtcagt

SEQ ID NO: 2465 - DNA, 52 bp, Chlorella vulgaris
ccaatagtgagtcgtattatttttttttttttttttttaatcatcccctact

SEQ ID NO: 2466 - DNA, 298 bp, Chlorella vulgaris
tactacacactatagtgagtcgtattatttttttttttttattttaaggtactgctactagaatacaagaaacgggtatataagttgactaccttatactactgagatttaaccctgaggggagctctgatttaacggtctccatgtagatgtcacacgctaacccagtgactaattagtttttttttaacttattactcatggtctataggtgagtatgagatgtatttactaccttatggttcggggaaaaatcccttatgtattaatacgaaattaaggtctgcttgacaatgtt

SEQ ID NO: 2467 - DNA, 145 bp, Chlorella vulgaris
cctatagtgagtcgtattataattttttttggctagtgcccttctgtcgtcttctcgcaaccgtaagccgctctacacgatccaaccttaccttcgcttgcatgccacgtgggggctcgtctatagtgtcagctaaattcaattc

SEQ ID NO: 2468 - DNA, 109 bp, Chlorella vulgaris
gtgagtcgtattaggctgccttaccttctttgccggtctcgcttcctcggtcgtgtcgctttcccgactccctcgggtgtccggttgctcccgtcccatccgcgggggg

SEQ ID NO: 2469 - DNA, 89 bp, Chlorella vulgaris
ttactactccctatagtgagtcgtattataatgtatatacatatcttcatacaattaatttttgacgcttgatcatagcactcattgca

SEQ ID NO: 2470 - DNA, 54 bp, Chlorella vulgaris
ccaatagtgagtcgtattattatgtatatacttacctacatacaatttattttt

SEQ ID NO: 2471 - DNA, 408 bp, Chlorella vulgaris
cccacgcgtccggacaaaaatggcggatcacgaccacgagcacgatgttcacttcgagtctgccgatgccggcgcctcaaagacctatccccagcaggctggtaccatccgcaagaacgcatacatcgtgattaacaaccgtccctgcaaggttgctgacgtgtccacctccaagaccggcaagcacggccacgccaagtgccactttgtgggcattgacatcttcaccggcaagaagtacgaggacctgaccccctcctcccacaactgcgacgtgccccacgtgaaccgcaccgagtacacgctgctggacgtctctgacgacggctttgtgtcgctcatggacgagaagggcaacaccgtggaccacctgacgctgcccaagggcaccgacgagctggagaagct

SEQ ID NO: 2472 - DNA, 411 bp, Chlorella vulgaris
  unsure (1)..(411): unsure at all n locations
cacccacgcctccgcattgacaagatctcctaccccagctttgtgaagaacctgatgaagctgccgggctacgagcgcctgacggccgagctggtgcagctgttcttcatgcccatcaagaagtgcggctcgttggacatggagcccgagctagagaagtcttacatctactgagcgcctgggcctggccttgtggcaatgactactcagcggctcgctgagtaatccactgcatggctagtgggtgtttggcttgtggcataccactgtttggccaggctgtgctgaagcctgnggccttggggttccctgctgcgcagccctgcctgcctgcttgaagcctttcncgctcggcgagtagcgctgtgcgggctatgctgtgtggcgctgtgttgangggtgggctgtgat

SEQ ID NO: 2473 - DNA, 307 bp, Chlorella vulgaris
aacaagcggagcgggacagcagtacggaccagcagtatgcgccagccgcaccggccatatcagcgaagagaagtaccagaacctgcagcttgcagttgccggcggcctgaatggggcccagccggggagcactggcggcgggcaggcacatgaattgcacaaagcgctggcgggcggcagctgccgccgacctctcctcgtgcttgctgtgcgcttgaatgctatgggcatggcgctgtaagacttgactagcttaaaataaaaaaagatgatatgaacaacaatgtcaaggaaaaaaactgaaatt

SEQ ID NO: 2474 - DNA, 440 bp, Chlorella vulgaris
gggtccacccacgcgtccgaatctgcagtggttttgtgtgacccagttgtttggccactgcctctgttaagtcgcaagtcttgcagttgctgacaagggctgcagccatattgtttgtttgatggtggcgtggttgtcattgcgaattggggcgagatactgtgcagttacgctttttagtgtttgtcggcttgctcagagtgtgcgtgtgatgcagtatggtggtgcatcatgggtgcgtgaggagctcttcatctaaactgctactggctgttgtgcgcgtgttatgcatcgtgggtgcacaggagctctttgtttgaactgttgccggctgttgatgcagatagccatagaatttgactcggttgtatataattgaacctggtcttggggctcatgggggacggtgtgacgcagcctgctttgttgacagtggggca

SEQ ID NO: 2475 - DNA, 408 bp, Chlorella vulgaris
cggtcctagactcccgggtccacccacgcgtccgaacagctgctcagcgggcagaatgttgtctgcgtgcgctgcgaggagatcaacatctctggcggcatggtcaggcagaaaatgaagtatgagcgcttcctgaacaagcgcatggttaccaaccccaggagggctgcctacaagttcagggcacccgcccgcatcctgtggaggactgtccgcggcatgatccctcacaagaccccccgcggcgcagcagccctggaccgcctcaaggcctttgagggtgtgccccacccctacgacaaggtgaagcgtctggtgatccccgatgcgctgcgcgtgctccgcctgcagcacggccacaagtactgcaagctgggagacctgtccgcagcggttggctggcgccaa

SEQ ID NO: 2476 - DNA, 393 bp, Chlorella vulgaris
gggtccacccacgcgtccgcacacgcgtccgaaacgaggctcgagctggcctttgagcagctggtagaccagtgcgacattcttgctgtccatgactgcgagtgctgttcgacctgcgcacacagcctcctagcaggcgagcttgaaagcaagccacacttgcgaggctatgtcttctaccacgggcaagacctggacagtgcacgagacgatggcgagctatacatccgctttgcatcaagaggagacacagcggaggacactgcggcggtggggcaggcagcagcagagattctgcgcgcttgtggcctggaggtttactggtctggcgagtccgaccgcgccatccatgtcacgcttcccgatgaagacatacactttttggacagcatg

SEQ ID NO: 2477 - DNA, 421 bp, Chlorella vulgaris
ggatccacccacgcgtccgcagagggtctttcaccatggtgacgcctctcatcaaggtgaagagcgtcaagaagcgcactaagcgcttcaagcgtcaccagagcgaccgtaagatctccgtcaaggagagctggaggcgccccaagggtattgactcgcgggtgcgcaggaagttcaagggatgcggcgtgaatatgcctaacatcggctatggcaccaacaagaagaccaggcacctcctgcccaacggcttctacaagtttgttgtgagcaacgtgaaggacctggagctgctgatgatgcacaaccgcaagtactgcgccgagatcgcgcacaacgtgtccaccctcaagcgcaaggcgattgtggagcgcgccggggagctgaatgtcaagctcaccaatgccggcagcaggctgcg

SEQ ID NO: 2478 - DNA, 474 bp, Chlorella vulgaris
cggtcctaaattcccgggtccacccacgcgtccgaggacgcgtggggtaggttccagctgcccgaacagctggccgccacgttcctggtgacagagggaccgtcatgcagattttcgtcaagaccctcacgggcaagactatcacccttgaggtggagtcttcggacactattgagaatgtgaaggctaagattcaggacaaggagggcatcccccctgaccagcagcgtctgatcttcgccggcaagcagctggaggacgggcgtaccctggccgactacaacatccagaaggagtccactctgcacctggtgctgcgcctgcgcggcggcatcatcgagccctccctgcagatcctggcccgcaagtacaaccaggacaagatgatctgccgcaagtgctatgcccgcctgcacccccgcgctgtgaactgccgcaagaagaagtgcggccactccaaccagctgcgcccca

SEQ ID NO: 2479 - DNA, 324 bp, Chlorella vulgaris
tcccgggtccaccaacgcgtccgaaccggcaacggcaacgagggcgagggcaacactggtgcctataacaagggccatggcaacactggtgccttcaacgagggcgaaggcaacaccggctacaagaacgttggcaatggcaacactggtgctgaaaacaacggcgaaggcaacaccggcgacaagaacaccggcaacggcaacaccggctctgagaacaccggcgctggcaacaccggcgttaagaacattggggctggcaacaccggctatggcaacattggcgccggcaacagtggctacaagaacattggtgagggcaac

SEQ ID NO: 2480 - DNA, 331 bp, Chlorella vulgaris
acggtcctagcctcccgggtccacccacgcgtccgaagacgcgtgggtttgcagcggtggtagtggcatctagggtgcttgaagggccaatccggtgcgcactgtaattgtatggccatgaaagcctatcccaacatcagcctgtgatagtgggtccgacggccatattttgtactgcattatagaagtgcctttcttgtgtctcaactaatggtgtggaggtgaggagagtgcgttgaagtaagtcttgggatcgcaccaagtccccaaaatattgagtttaggggcctcagggactcttgctaccggacccttgtaaatgggctgccag

SEQ ID NO: 2481 - DNA, 431 bp, Chlorella vulgaris
cccacgcgtccgagccgtggagtggtacggccctgacagggccaagttcctgggccccttctctgagggctccacccccagctacctgaagggcgagttcgccggcgactacggctgggacactgctggtctgtctgccgatccccaaaccttcgctgcctaccgcgaggttgaggtcatccatgcccgctgggccatgcttggcgccctgggctgcctgacccccgagctgctgcagaacgccggcgtggccagcttcggcgacgctgctgtgtggttcaaggctggtgcctccatcttcggcgatgatggcctgaactacctgggcaacccctccctggtccatgcccagtccatcgtggccaccctggccgtgcaggtcatcctcatggctcatgctgaggctttccgtgtgagcggcactgccccct

SEQ ID NO: 2482 - DNA, 72 bp, Chlorella vulgaris
cccccttcctggtataaacaccaaaattcttaaaaaaaggggggagggacctttccccccgcctcagaaagg

SEQ ID NO: 2483 - DNA, 467 bp, Chlorella vulgaris
  unsure (1)..(467): unsure at all n locations
ggtcctaacctcccgggtccacccacgcgtccgacgattcgaactaacgcctatccgaggcttcctcgaagacagaagacatcaacatgtctgacggaggggacagcccgaaggccgccgaggcccccgccgccgccgcggctcccgcccccggcgagcccatggacatcaacaccgccatccagctggtgctcaagaaggcgctggctcacgacggcctcgcacgcggcctgcacgaggcctgcagggccattgagcgcggccaggcgcagctgtgcatcctcgccgacgactgcaaccagcccgactacaagaagctgattgaggccctgtgcgccgagcagagcgtcaacctcattgccgtgcccgaccccaagaccctgngccagtgggcaagcctgtgcaagattgacagcgagggcgaagcgcgcaaggtggtcggctgctcgtgcgccgtggtcaccgac

SEQ ID NO: 2484 - DNA, 458 bp, Chlorella vulgaris
  unsure (1)..(458): unsure at all n locations
acggtcctaaccttccgggtccacccacgcgtccgaccacgcgtccgcccacgcgtccgcccacgcgtccgcaccatcccacggtgcttgggatagctgcaggggtgtcaagcaggcatccgcaccatgcctttcaagaggtacgtggagattggccgtgtggccatgattaactacggccctgagtacggcaagctggtggtcatctcagacgtggtcgaccagaacagggccctgattgaccggcccgacgagacccgccgtgtggagaacttcaagcgccttgcaatcactgacttcaaggtggagattccccgcctggccaagaagtccgtgctgaagaaggccctggaggacgctgatgtgttcaacaagtttgctgctagcgcctgnggccagaagctggccaagcgtgccgccaaggccgaccagactgactttgaccgctacaaggccat

SEQ ID NO: 2485 - DNA, 283 bp, Chlorella vulgaris
tgctaacgcgttcttgggaccatggctgagaagtcatgcacgatcaggacacgagagttcatgaccaaccgcctgctgcaccggacgcagtttacccttgaggtgctgcaccctggccgtgccaatgtctccggggctgagctgcgctagaagctgtccaagatgtacgacgtcaaggactccatctgcgtgtttgtctttggcctgaacacccagtttggtggcggcaactccacagggtttggcctcatccacgatacactccaccgggccaagcacttcg

SEQ ID NO: 2486 - DNA, 283 bp, Chlorella vulgaris
tccggagtcacccacgcgcccgagctgctggcaagtgctcagaggtcaggtgctgcgctgctactttcctgacagtctggatgtgttgtaactgctcgcatcagcaaaaaaaaaaaaaaaaaaaaaaaaaaaaaaaaaaaaaaaaaaataaaaaaaaaaaaaaaaaaaaaaaaaaaaaaaaaaaaagaagaaaaatcaaaaagaataaagataaaaatacaagaaaaaaaaaagggtcacgacaccaaaaggatcaacaagtataatttcataatccatcgtc

SEQ ID NO: 2487 - DNA, 314 bp, Chlorella vulgaris
  unsure (1)..(314): unsure at all n locations
gggtccacccacgcgtccggaccagtcgctggtgcgcggcgagcgtgtgacgctgtccaaggtggacgcctttgctgacggcgtggccatcaagctgccgggggccgagtccttcaagctgtgcanggagctgctggatggcatggtgctggtggacaactcggccgtcagcaccgccatcaaagatgtgttcaatgaggtgaggtccatcttggagccagcgggggcggtggcgctggcgggagccaaggcgtacctgcagcgggtacaagtcaaaggcaagaatgtggtcgtggtcactagtggcgccaaca

SEQ ID NO: 2488 - DNA, 438 bp, Chlorella vulgaris
gggtccacccacgcgtccgcatctgcccgtttcggcgtccgcgcccctgtctcccggggcacccgccaggtgacccgcgcctccgtggagtggtacggccccgaccgcgccaagttcctgggccccttcaccaaccccccttcctacctgaagggtgagttcgctggcgactacggctgggacacctctggcctgtccgccgatcccgagaccttctcccgctacagggaggttgaggtgatccatgcccggtgggccatgcttggcgcccttggctgcgtcgtgcccgagctgctggaccgcaacggcaccgtcaactttggcgagaacgccgtgtggttcaaggccggtgccgccatcttcggcgatgacgggctgaactacctgggcaacccctcgctcatccacgcacagtccatcgtggccgtgctgctctcc

SEQ ID NO: 2489 - DNA, 416 bp, Chlorella vulgaris
ccacccacgcgtccgaaacactacatcgctgcctgagaacttctgcatcatcgagagccgcgagtcagttaagaactttgctgacatgcagctggatgaaattaagcgcaacattgctgcgcgacggaatcggatattcctgctgatggaagaagtgcggcggctacggatccagcagcgtcttaagcagggtgagctggatggcaaggaggagctggaggaggagcagtacccctcctctatccccttcttcccccccgtcaacgagaagaccctccaatcgtacatccagctatacgcggtcaccgtgtcggccatcatcttgtttgggggcctgctggcgccctccctggaggtccacatggggctgggaggcacctcctactacgaattcatcaccggcctgcggctgccca

SEQ ID NO: 2490 - DNA, 439 bp, Chlorella vulgaris
  unsure (1)..(439): unsure at all n locations
cggtcctagcctcccgggtccacccacgcgtccgattcacctagtgatagcattctttctgctttatagtctttaccttttgtacgtattggacactcccccttgcttcctttctttgccaagtccttcaaaccgggcctctgccatcgtgttctgtggtcctcttgagagctgtttctcttactaagcttgcaatctctagtacaagtcccggcttccatctcaaatgtggaaggtgaacatgatataaatattgtttgtgcttgcccgcctgagtgcctgtgcagcagggcaagtgcgcaagcccccctcggtgtagttacttggcagaagacttgcttattgatttggctgcggttttgtgtgcttcattgtgtangagaagaataggctgagcatgccattggcgttttgtgctgatttcctgggactggtcttt

SEQ ID NO: 2491 - DNA, 393 bp, Chlorella vulgaris
ggtccgaacattccgggtccacccacgcgtccgaccacgcgtccgtgcttttcttggaggtgtgacacttgtgactggcctctgggttggctcaacggtcgtctccttgtattacaacaaccggcagcttcaagagcagcagaggatagcggaagccacacggacagatgacaaggagtgagagttcctgggctggcagagggtttgttccatggccttgttagcttcgtcctgtaccttgcaggggtcggtggcttgtgtacttgttaggtgtgccactgccattccatggcagaccttccctcgttgttgggcaaggcgaggccatcagcacttgatgtagttgtaatgtaggccggtgcattgggctgaatgcacgggttgtacgggtat

SEQ ID NO: 2492 - DNA, 466 bp, Chlorella vulgaris
  unsure (1)..(466): unsure at all n locations
cggtcgtaaattcccgggtccacccacgcgtccgacatcgagcacctgcgtgagtacctgaacttgcccagcgagattgtgcccgccacactgaagaaatcgaccaggcctctggagcgggagggcgcacgcccgccgcgcggcgacaggccgccccgccgcttcgacggcgagggccgcggcggctaccgctctgccgagggcaagactggtgcccctggcgagtatcgccccgagttccgtggtggctttggccgcggctctgcccctccccagtaagcagccaacaggacatggacgatgcagcggcggcccagcagggctagactgacatgtttggaggcaagcagggttacatgctancaagtgcagggcatgctgcatgcagccgcagttcagcaggcataccagttgaatgacatgtctcatggcatcgggttgccctgcctgtaaaactacgctgccc

SEQ ID NO: 2493 - DNA, 435 bp, Chlorella vulgaris
gggtccacccacgcgtccgacaagattttgatgggcaagaacacgctgctgcgccgctgcatccgcctatactgcgagcgcaccggcaacgaccactggctgggcctgctggactacctggtcggcaatgtcggcctggtcttcacccagggcgacctcaatgaggtgcgcacgcaaatcggtgagttcaaggtgggcgcccccgcccgcgttggcctggtggcccccaacgacgtgaccatccccgccggcaacaccggcatggacccctcgcagacctccttcttccaggccctcaacatccccaccaagatcaacaagggtactgtggagattgtgtctgacgtggtggtgtgccgccagggcgagaagggtgggcggctctgaggccaacctgctgtctaagctgggcatcaagcccttcgagtacggcct

SEQ ID NO: 2494 - DNA, 440 bp, Chlorella vulgaris
gggtccagccacgcgtccggagctactgagttgtgcccaaacgcccacccccacacatgatgggccttggccaaggaacactaccgactgcagcggcctccgactgacaagctttactcttgatgataccaacgaatgcatgctggggcgctggtgctgctcgtagcaaggcaaaggcgctgttgaatgaatgtctcgcttgctcgctctcttgctcggaggcattgctagtgagggaccagggtgggtgagggggcggcccgttcccttgcgcaccctgcgacgctgtttatgcttttcatggctgtacagaggcacttggcagttcctacggcacgcattgattggtgttcaaattggctgggagccggtactaaggcgcacacatattctgaggagctgggttttagtgagagaccgttggtcggccgagtgtctgt

SEQ ID NO: 2495 - DNA, 439 bp, Chlorella vulgaris
cccacgcgtccgtagcggccgggtggatcctgccctgctcaaccaagccccagtctgacctggtgatcgagtacagccaggggtggggcatccaggtcatcgagggctggaactcgcgtgccaaggtcggcgccgacctgaccgtgcagaagctctgaagctccacggtgcctgtgttgggtcagggggcctgggagccccattcctaggtttgggtggggttagggggcctgacggtacagaagctagcttggtggggccgctgctcctgctcggttcgcgtttccctacctggggccgctcagtcacgtttgaggtgagacttgtcaggtttctagtccacagcccacgcgagtttatgttactgtgtcgatggtatgtggccgtggtggcctcgtggcaagcattgtgatgtagcgagggtaggcccaatgggttt

SEQ ID NO: 2496 - DNA, 428 bp, Chlorella vulgaris
ccacccacgcctccgcacacgcgtcaggccaactacggcaactgcaatatggggagcgccatgaagggtgactttgttgagtgcccaggcacggagctctactgagcgacctgtcatgcccagcttgctcagcagtggcttactaccgagagttgccttcacccgcaacagttctgtggtttcacaatggcttcaggaggtggctgcggcatcggtgtgagcagagtgatgggtagctgttgcgctgtttaggtgtgccgcctggtgctatagctttcatggtatacgagtatgcagggtaggccaaagaaactgcagtactttctttgcccctgacatcaatggcgctctgatgtcttctgggcttgaaactgttgatatggaggtgattttgcggctcattgttattcttggccatggattgacat

SEQ ID NO: 2497 - DNA, 462 bp, Chlorella vulgaris
  unsure (1)..(462): unsure at all n locations
acccacgcgctccgaggacgcgtgaggcggacgcgtgggctctgaggagggggcatgggaaaggctgccagcaggcttggctttccttcgctgagcgaccattcagtgacgtcatctaatgctgcttcatggtgctgcaaacatacagtgctgcctgaccatgttgctcgtttgcgtgatgctaatttgttcgggagtaggtggctccccaagagaatcaattgtgtgctcagtactcgggtgtatggtgcgtctcaactttcttacccctggacagatatgcttgggctatgtatactctgtacagggcacaatattccagcgtgcaacataatatcactgaaaaaaaaaaaaaaaaanaaaaaaaaaaaaaaaaaanaaaaaaagaagaaggaaaggaagggaggaggggaggggaggagaggaagggagagggagggggggggggggcggggggggggg

SEQ ID NO: 2498 - DNA, 319 bp, Chlorella vulgaris
ccaagcgtccgcacacgcgtccgcttgtgctttcttgttaatagttatcgaggggacaatgcaggccactatgtcgagggtcgctctgggcagcatcgcgggcctgaggcccgctgctactgttcgtcccagggccagcaggacggtggtgagggccatggctgacaagccggcccctggcagcctgcaggttgtagcgcccatcaacggcgacccctacaatggcatgctggagacccccgtgacctccgcacccctggttgcctggtacctttccaacctgcccgcctaccgcaccggcgtgttccccctgctccgc

SEQ ID NO: 2499 - DNA, 447 bp, Chlorella vulgaris
gggtccagccacgcgtccggactgccacttcggacaccacaatgatgcagtgcatgtccacccgttctgcgtttgccttcaagagcagggcagcccagaggcccagccgcagccccttcaaggtccaggcctacaaggtcaccttccgtgacgccgccaagggcaccgagaaaaccgtggagtgcggcgctgaggactacctgcttgacattgctgacgccaacaggattgacctgccagccagctgcaggggtggcgtgtgcggcagctgcgtgagcaagctggtgtcgggccagatcgacaacagctggcagtgcgaactggacgacggcaacgtgctttctgccgagcagatggcggccgggtggatcctgccctgctcaaccaagccccagtctgacctggtgatcgagtacagccaggggtggggcatccaggtcatcgaag

SEQ ID NO: 2500 - DNA, 435 bp, Chlorella vulgaris
  unsure (1)..(435): unsure at all n locations
gggtccagccacgcgtccgggcaagcgaggctactgcaggctgctggcaagaccagccgtggatgacaccagcgggtaggtggggcagctcttcaaagggaggcgccccacgacgcaggagcgggacaagtttcagaaaagctttctcaccttccttcgcacagccatgcctgccggctgggatagaatggagtttgagctgctggtctacgaggaggtcatagcaggtcacctttgctgggccgtcagggcgccaagatgcctatgtggcagaggcagccctgcttgtacgcataaacacccccagtgctagcaggcagcagcagccgctggtgaagaggagcatgagtgtgctgacagccgcgcagcatagcaggccagcgagccagctgccacagtgcttgctaaggctangcagccagttgcactgtgtga

SEQ ID NO: 2501 - DNA, 450 bp, Chlorella vulgaris
tccggagtccacccacgcgtccgatcccccgtcgacaacaggtccaaggttcacaagatgcagaccctctctgcccgtttcggcgtccgcgcccctgtctcccggggcacccgccaggtgacccgcgcctccgtggagtggtacggccccgaccgcgccaagttcctgggccccttcaccaaccccccttcctacctgaagggtgagttcgctggcgactacggctgggacacctctggcctgtccgccgatcccgagaccttctcccgctacagggaggttgaggtgatccatgcccggtgggccatgcttggcgcccttggctgcgtcgtgcccgagctgctggaccgcaacggcaccgtcaactttggcgagaacgccgtgtggttcaaggccggtgccgccatcttcggcgatgacgggctgaactacctgggcaacccctccctc

SEQ ID NO: 2502 - DNA, 461 bp, Chlorella vulgaris
  unsure (1)..(461): unsure at all n locations
cggtcgaagattccgggtccacccacgcgtccgaccacgcgtccgcccacgcgtccgcccacgcgtccggattacttgcgctttctctctcatcacctcacattctttgggacgtgcttagccttctctctcagtgcgccataagatgctgctgttgcagatgtttgtcgtgtatagggaacgcagggtgtgtgcatgattccacagccgcatttgataagggctggcaggtggccgctcgctattggcagcgttttgattctcggttgcatgcgtgtatttcatggtggcccgcgctttcttttcgctgcaccgctgctgtgggcctgcccctgctccgggctccaaccatgcacaggcactcccgcacggtcaactgcagatttgggaagctgggcgtgcggggtgcgtggctgggggctgtgtgtaggggaagggttctgcagcanncggggccgctg

SEQ ID NO: 2503 - DNA, 408 bp, Chlorella vulgaris
tcccgggtccacccacgcgtccgacccgtctcgcaatagttccagggcaatcactatgcaggcaaccatgatgaagaccttcggcgccagcctgcgcaaggctgtgcccacccagggcaagggcacccgccaggtgacccgcgcctccgtggagtggtacggccctgacagggccaagttcctgggccccttctctgagggctccacccccagctacctgaacggcgagttcgccggcgactacggctgggacactgctggtctgtctgccgatccccaaaccttcgctgcctaccgcgaggttgaggtcatccatgcccgctgggccatgcttggcgccctgggctgcctgacccccgagctgctgcagaaacccggcgtaggcagcttcggggacgctgctgtgtg

SEQ ID NO: 2504 - DNA, 436 bp, Chlorella vulgaris
gggtccagccacgcgtccgacggtatgctgccagcgctgaggcctacctaacgcagggcgtggggatcgctaccgagatggccatgattgtcagctgggataagggcgtttttgcggggctgacgtggtacgacttccagtcgtgcgccaactgcggcggcatctactcggaccgctgcctgaggttgcaggaggacgatgtgtaccagcaatacccacagacgtcctgcgcggcgccctttgccaagtgcgcctgccgcggcctggcctgcgtgtcgggcaactgcacgaccgccatctatgttggccaccgcggcactgacagcaagggggccgctatgaccagcgcctaccagatcgagcagctgaaccagtacagctttgtcaactggttccagtcgctgttcatgaagatcgacaacgcgtatgacaactc

SEQ ID NO: 2505 - DNA, 331 bp, Chlorella vulgaris
cccacgcgtccgccaacgcgtcagcccacgcgtccgcggacgcgtgggcggacgcgtgggccaattcccgggtaacgccgtcgccagttttaccgctgcttgcctctcgcggcgattaccttgctatccatggggatggctgttccagtctctcgtggctgtacgtggaggacgtgggcgaagcctttgacgtggtgctgcatacgggctgcatcggtgatgtttacaagatctgcacccagaaagagcgcactgtgctggatgtgggacgtgacatttgcgagatgttcaacctgcccgatagcacgattgtgcacgtgcgcgaccgtgc

SEQ ID NO: 2506 - DNA, 459 bp, Chlorella vulgaris
acgcctgcagagccggtcctagattcccgggtccacccacgcgtccgagagacttgcgctggtggtaacactggcgagtgcgctgccgcctgggagaccgttcaagagctgtccgccgctgcctcccaggcaaaggatgctgcataagccaagccctcgttcagtcaacccccttgacaagtactgcgaggaccatgcctacacgtgacgagtgaacggtgtttgacgaatgaagctacgggttagctgcgcgtaaccagcagatgcccctgtatgcggaactgcaattgcggcctgtccgtgctccctgtaccatgatcccgctctgcaagtgatggcagcaatagagcttggggcaatcggtcttgacaatatggtagcaacatggcagcctaaccctcagagttgtcactgcgctgcctcacggttgacagcagcctgtctgatctttcattctga

SEQ ID NO: 2507 - DNA, 445 bp, Chlorella vulgaris
gggtccagcccgcgtccgtgcttatacagtcggccaacatggttagccgtctgagcaagaaccgcaagaagcgcggtcatgtcagcgccggccatgggcgtatcggcaagcacaggaagcaccccggtggccgcggtaacgccggtggccagcaccatcacaggattatgatggacaagtaccaccctgggtactttggcaaggtgggcatgcgctacttcaacctgaagaagaacaagttccactgccccatcgtcaaccttgacaagctgtggagccttgtgggcgaggaggctcgtgttgaggcctccaaggactcgagcagcgctgccgtgattgatgtcaccaagtatggcatcttcaaggtgctgggcaagggcgagctcccgcagcagccagtggtggtgaaggccaagtttgtgagcaagctggcggagcagaaaat

SEQ ID NO: 2508 - DNA, 431 bp, Chlorella vulgaris
taccggtcaggaattcccgggtggacccacgcgtcagctaatgcgtccgcggacgcatgagattcgaccgggtattgaacggagtgctccggaggactgcagcatgccatctgggcccacagccctgaaagatgctctcttcggtagtccaggtcacactgaaggagcccaattccatctccctcgcaaaatccccctgcgtatcgaccctaaatcatactttgccaatgacacgactttcttggcatggatcaacatggccaccaaacttggaaccatttctatagccattgctggtcttgctgcatgacgatgacccacctaattaacacaagggcgcgatcacgtatagcactgtagagctcataaccacgatgcatgctgcctatctctatagcgatgattggctatgcactctttgtcatcgaccc

SEQ ID NO: 2509 - DNA, 389 bp, Chlorella vulgaris
ggcttctccatcctgaccgccacgaagttcaccccctgaattcagccctgaattttgagggaaatcccctggctgctgctagttcctcgttgttctagctcttggttggttgccggtgtgtcgctgttgtgtgaaggggagaggcgtgaccccttggttgtctactggcagcagcagcagcacccagcagctggacggtcgtattgagatgtgtgtgacgcggcaaaattcgtaacgcacgaggaaccgataagagcacctttaattccccctgctggttggagttttgctgcatttgcactgtacactggcgggctgtatgcgcggtggcccatttgcttggctgcgtgtcctctagttttgtaacctccacattctccaaaagtaac

SEQ ID NO: 2510 - DNA, 296 bp, Chlorella vulgaris
cccacgcgtccgaagtcaaggtgccttgcgaggcgccgtccttagggtgctgccattgcaggctgccttggcaagctgcattttcctatctttgtcttgaagcggcggattagatgtgtctggtggaagtgtcgtatgttatgttatgttgttaaatgttacctttggtaggtgtccgttcccagtttcggcatgcatttctgatatttgttgaattcgtagtcaaactgaatggacttggtacagtgtagcaactgccctctcgggcatggagaaaaagacaaatttaacatgtc

SEQ ID NO: 2511 - DNA, 247 bp, Chlorella vulgaris
ccccaatcggacccttgggcggacccttggaaaattgtccattccttgctgttggcaattttggccccaacattgcaccaacctgtctttgtcaaagaggcagctatttaagggggcttgctgcaaattcttgtggcagggtattccctaccaaaaatggcacattgctttcaaaaacggtggctggtattaaaagcttacacccgtcttgggttcgggtattttgaaacccaccccaggattcccc

SEQ ID NO: 2512 - DNA, 391 bp, Chlorella vulgaris
taatagggatcatatcggcacgaaccgtcaacatgccgaagacggtcgtggttgattgccggggccatatgcttggccggctggcgagcatcctcgccaagcagctgctcagcgggcagaatgttgtctgcgtgcgctgcgaggagatcaacatctctggcggcatggtcaggcagaaaatgaagtatgagcgcttcctgaacaagcgcatggttaccaaccccaggagggctgcctacaagttcagggcacccgcccgcatcctgtggaggactgtccgcggcatgatccctcacaagaccccccgcggcgcagcagccctggaccgcctcaaggcctttgagggtgtgccccacccctacgacaaggtgaagcgtctggtgattcccga

SEQ ID NO: 2513 - DNA, 342 bp, Chlorella vulgaris
cggacgcgtgggtgcttgtgggcgaacaggccgggcaagtggcctctttggccagtcagggtttggtgtggtttaggtttgggtgtcgtgggccaagctcgcactcattgctgctcctgctagcactgcaatatccctattgaaagctggcttgtatgatagcgacttggctgtatatcctcggctaatctaccatgtactggttgtggctattagttgcgatgctgtcctgtggttttcgtgaaccggtgaagccagacatctagtatttggcaacatctagtagttctggaattgctcaggtagtacaagttacgtaagctgccgctggcgattacaaaa

SEQ ID NO: 2514 - DNA, 231 bp, Chlorella vulgaris
ccccggtgtgcgcttcaaggtggtgaaggtgtctggtgtgtcgctgctggctcttttcaaggccaagaaggagaagccccgtaactgagcaagtggaggccggagaagcgctggtcgcgtggcggcagcgcctgtatcatcgttgttccttggcgtagatgctgtccctctcttactttccgcggctgctactgtaacacacttcctagacaaaaaagaaaaaaataaaag

SEQ ID NO: 2515 - DNA, 253 bp, Chlorella vulgaris
tttttgtaggtatgctggttacccgacaagcttatctacaggcgaaactcagaacgacaacacatgtcctgaaagcgcttccatagcccacatgttccagtgctgccactaaggaggcggagctctcacaattgccaaccacatcacaggcttgtcggtgcatgtttgctaggccctgcaagtagtaggtgctactagcacggttgccaagaagaagactgggtagctggctgcatggggaatgcatggggtg

SEQ ID NO: 2516 - DNA, 264 bp, Chlorella vulgaris
ctttgagggctcctcaaatgctgccgggattgccctttcgtgtgtcttctttgttgggctggctggcctagcgctcttcctcaagacctaatctcatcgttcggttttcctcgggtagactccagagtccatgttgtattgtttaacactaccttgcttctttgctcttttctgtgaagttctgttaagttttctggtccagcagctgtgcaagctcccataacacaaagcaaaaagaagaatggaaaaaacgggtcaaagaag

SEQ ID NO: 2517 - DNA, 188 bp, Chlorella vulgaris
tttaaatttcatccctgctggctggtttgcttacgtctagtatggtctgaactgaaatactgctcttgcggatcacggtgcccttcagctcatacgggcttgtcgtagttttgtcaagcacgatccttgttgccatgcatacaggcctatgagtcctgctctgtgtgcaagaaaagtgcagttaaaaa

SEQ ID NO: 2518 - DNA, 402 bp, Chlorella vulgaris
ccgggtcgccccacgcgtccggcttctccctcagcccagcagcagctctgcgggcggtgccctcgctccccctggcccctcccgtgcgcacgatgctcagcggagcgctgggtgctgcggtcagggacagcaactccctctttgggctgctgactgccgggaaccatgtggtcacgctgtgctgcccccagacctcgcccctggggccatgggacctcctgctcctacagaactttttgctgtccagtcccgccctccgacaggccgaggccttcactcccttctgcctcccgcactacaacccctcggccaacctgcacgcgtacgtgcactacctccacccaccctcgggcgtcgcggtggtgctgctctgtggcagcccccccgacttccatgcgctct

SEQ ID NO: 2519 - DNA, 415 bp, Chlorella vulgaris
ggtcaggcattcccgggtggacccacgcgtccggccgtgcacatgattgaggatgctgagaaggctggcaaaatcacccccggcaagacgaccctggttgagcccacctccggcaacaccggcatcgccctggcattcattgccgcctccaatggctacaagctcatcctgaccatgcctgccaccatgtccctggagcgccgcgtcatgctgctgtcctttggggccgacctggtgctgacagacccggccaagggcatgaacggtgctctggctaaggctgaggagctggcagcgggtatccccgactcctacatcctgcagcagtttgagaacccagccaatcccaagatccactacgagacgacaggcccggagatttgggctgacaccgcaggcactgttgacatttttg

SEQ ID NO: 2520 - DNA, 422 bp, Chlorella vulgaris
ggtaccggtcaggaattcccgggccgacccacgcgtcagcttgttggcgctgtcgcactataggccccgtgctgcagaccgggtgctagccttcttcaagccaggggtggagtgggtggcgcaccggtggctcccactgttctacatcccagcactggtaacgctgccactggccattaagccgctttcagacctagtgctggcaaaggctgtggcggtggtgtgcatcggtgtggttctcacactagccatgacagcccaggtggctgtgtggatacgggcagcaaccaggactgagctggcagacttccactatcactcagcgcacattgccttctcggtctggcactatggcacctggggctgcctggcgttaggctctctgctggccgctggctaccttccccaggagctcggctctc

SEQ ID NO: 2521 - DNA, 370 bp, Chlorella vulgaris
  unsure (1)..(370): unsure at all n locations
gggtcgagcacgcgtccgccgatagctgtttgcgttcgtacccgaggattagtatgccactgtttgaggcaacccaagcccccgtgctccgtcgctcctcagggagcggttggttacgggggtttcaactaatggctttccatggacaagggcatgaagctttctgcgagaagactccttgcgagtgcactgcatttctttcgtggagacactttgccgcagatgtgctgttcgaggatttcgttgtgcatctgctcgtacaaactttggttgtcatttggttgtcttgtaagttgagggtgagctttgaaatcttggcttangatgcgcgacgggttggagtagatttcttcctgtggaacttttttga

SEQ ID NO: 2522 - DNA, 448 bp, Chlorella vulgaris
  unsure (1)..(448): unsure at all n locations
ggtaacggtccagaattcccgggccgacccacgcgtccacccacgcgtccgcctggacatccttcagtctcacaccagctttccacattgcttcccagtgtctcatctctggcaccatggcccgcaagttcttcgtcgggggcaactggaaatgcaacggtactgtgaagagcaacgccgatctggtaaagaccctgaacgatgcaacggtcccaggaactgatgtcgtggaggtggtggtggcccccgcagctgtgcacatcacccaggtgaaggactccctgcgcaaggactttgaggtggcagcccagaacagctgggtgaagaagggcggcgcctttactggcgagctcagtgctgagatgctgaaggacctggggctgaagtgggtgatcctgnngcactctgagcgccggcacatcatcaaggaggccgacgagtttattgc

SEQ ID NO: 2523 - DNA, 383 bp, Chlorella vulgaris
tagaacagagggtctttcaccatggtgacgcctctcatcaaggtgaagagcgtcaagaagcgcactaagcgcttcaagcgtcaccagagcgaccgtaagatctccgtcaaggagagctggaggcgccccaagggtattgactcgcgggtgcgcaggaagttcaagggatgcggcgtgaatatgcctaacatcggctatggcaccaacaagaagaccaggcacctcctgcccaacggcttctacaagtttgttgtgagcaacgtgaaggacctggagctgctgatgatgcacaaccgcaagtactgcgccgagatcgcgcacaacgtgtccaccctcaagcgcaaggcgattgtggagcgcgccggggagctgaatgtcaagct

SEQ ID NO: 2524 - DNA, 422 bp, Chlorella vulgaris
ggtctagaattcaccgggtcgacgcacgcgtccgcccacgcgtccgatcctttttagattgtgggccctttgaagggaccactgatcgcaccttgctgatctacgtgacgcacacggtgcacccttgtggtgtctgggcgcacccacctcttgcagactatactcttggccctcgctcctttcttggcttgaggtaaagcataccaacccaaccactacgccgagggccgcaaaaggacttaccgcgcgtggcgctggctaacacaggccccatgggcacgcaaaactccgttgccagcactgctgtcaacccgtcggcgcctctcctgtcccacctcatagcggcatgactccccaggcagctgatgatgcaagccatatgggatgccaataaccacgcggcgttatttttgcaagggaac

SEQ ID NO: 2525 - DNA, 298 bp, Chlorella vulgaris
gcagtacgaagcaactgactttggccttctcagcagtacgttaagggtcatagtttcatggcagaggcatgttagaggttgccagcacggccagtgccttgtcatggagtcggggtagacacatgcagcagcagcacatgctgtagcttttgctgacccttgcttttgcgctgctgtgggtatgcctgttagggctggtattgggattgtgagctaccttgatgggatctgttggtcatggtgtctgctgaagcaggcaaatgcagatgcccttgttgtaagagtgacatatgaaaaa

SEQ ID NO: 2526 - DNA, 293 bp, Chlorella vulgaris
acccacgcgtccgcgtacgccttcgcagacgcatgtgaagggtcatagtttcatgccagaggcatgttataggttgccaccacggccaatgccttgtcatcaaggcggggtagacacatgcagcaacagcacatgctgtagcttttgctgacccttgcttttgcgctgctgtgggtatacctgttacggctggtattgggattgtgagctaccttgatgggatctgttggtcatggtgtctgctgaagcaggcaaatccacatgcccttgttgtaaaactgacatatgaaaaa

SEQ ID NO: 2527 - DNA, 334 bp, Chlorella vulgaris
ttttacattgcgccccattaaacacaggaaagagggacctggaaaccgttcacaactgggcaacgcagtggcgcttcatagcaaaactttgaggcacaggctgaggacagatgctggagcagtcaacacagcagcagagtcaagcgagcagtagcagcgaaatccccaccgcagaacaaataagcagacaaacagcaggacgaaaatggtacacaggccgccgactcaacacaatgcacatgcagttcattggcaactcaaagcaccagaccagtggacagtagccatatcgtgtgtaataatacatactcgatagagagagacagttgtaaaa

SEQ ID NO: 2528 - DNA, 353 bp, Chlorella vulgaris
  unsure (1)..(353): unsure at all n locations
gtggcgcttgctgtgactgaccagggagtggccgcattgcatattctggaagccgtccgcctaacgcaactggcaagcaaagttttgggccatttacgggacagtgaagcttgcatctgcagtttttacagttttgggatgggggttttcctcttatcctcacttggcggcatttgtagtgataaaatggggtcatgcattcatcagagcactgccaaaactacatctcagaggtctaagtttagtgttgcacctgaccactgtagtgtacatgatagcttgtagtgttactccacattgtgcagctattgagctctttgaatagcagtggtacaaaaaanannnnannnnnn

SEQ ID NO: 2529 - DNA, 358 bp, Chlorella vulgaris
cccacgcgtccgcccacgcgtccgggaggaacagcctgaagtatctgtcgagtgccgagtcaagcactgtttcttccctttccctgctgctgctgttggactgccctccacacgctcccatgttgacttgacctgtcattggcgtacatgtgcctaggttaagagcggtcaggattgtgagaaactgaacatggtacattgttgagtccgcagccaaaaaaaaaaaaaaaaaaaaaaaaaaaaaaaaaaaaaaaaaaaaaaaaaaaaaaaaaacaaaaaaaaacaaacaaaaaaaaaaaaaaaaaaaaaaaaaaagggggggccgccctaaaggtttcaagcttacttacccgtgaat

SEQ ID NO: 2530 - DNA, 241 bp, Chlorella vulgaris
tacggtctagaattcacgggtcgacccaggcgtccacggatgcgtgagcggacgcgtcagatcaaagttatcaactacttgtatgatggcctacatggctggtcatacggtggcaggggcgaatcgcgctttcacccaacaggtggccatcgataggcgacgagctgactcgcgcatatggcgtcggaccgtcactgtaattatcagacacggccggttccaatttaccggcatttggagg

SEQ ID NO: 2531 - DNA, 431 bp, Chlorella vulgaris
ccggtctagattaccgggtcgagcacgcgtccgactggacgctgggtccaatacagaagcaatcatggcggacgcaggggagcacaaaaagaggacgttccgcaagtacacctaccgtggtgtggacctcgaccagctgctggacctcagcactgacgagctaatcgagctcttccccgctcgtcagcgccgcaggttccagcgcggcctgaagcgcaaggccctggccctgatcaagaagctgcgcaaggccaagaaggaggcgcccgctggcgagaagcccgagccggtgcgcacccacctgcgcaacatgatcatcatccccgagatgatcggctccgtcgtcggcgtgtacaacggcaagaccttcaaccaggttgagatcaagcctgacatggttgggcactacttggctgagtactccatctcct

SEQ ID NO: 2532 - DNA, 419 bp, Chlorella vulgaris
ggtaacggtctagaattcccgggccgacccacgcgtccagaccttctcccgctacagggaggttgaggtgatccatgcccggtgggccatgcttggcgcccttggctgcgtcgtgcccgagctgctggaccgcaacggcaccgtcaactttggcgagaacgccgtgtggttcaaggccggtgccgccatcttcggcgatgacgggctgaactacctgggcaacccctccctcatccacgcacagtccatcgtggccgtgctgctctcccagattgtgctcatgggcctggttgagggctaccgcgtgaacggcggccccgctggcgagggccttgacgccctgtaccccggcgaggcctttgaccccctgggcctggccgacgaccccgacagcttcgctgagctcaaggtcaaggaga

SEQ ID NO: 2533 - DNA, 387 bp, Chlorella vulgaris
cggtctagaattcacgggccgacccacgcgtcagaccaggcagtacagcgggtgaaggaggtgtaccgctcgctggacctggagggggtgttcaggcagtacgagcaggacagctacggcaagctggtggcgaccattgaggggcaggacagcctcccgcaggaagtcttcatgatgctgctgaagaaaatctacaagcgcaacaagtgaagccaaggcaaccacctgcgaagcaacagaggagtagaggctcacttgttgctgctgctcgtgccactgcttaccttctggctgacacctggatgctgcactgataccgcccgctgctcgtcacgtgcataagcatcaaataattgcttcctccggtgtgggcaaagtgagattttt

SEQ ID NO: 2534 - DNA, 265 bp, Chlorella vulgaris
gtcaggagttcccgggtcgacccaagcgtcaggtgaaacatggcacccaagaagaaggttgcggcccctcctgccgcggtcaggaaggccgctcagccggccaagcccgtgaaccccctgtatgagaagaggccgaagaccttcggtatcggtggtgccctgccacccaagaccgaccttcaccgctttgtgaagtggcccaagtatgtgcgcatccagaggcagaaccgtgtgctcaaccagcgtctcaaggtgcccccccgca

SEQ ID NO: 2535 - DNA, 229 bp, Chlorella vulgaris
gtacggtcaggaattcacgggccgacccacgcgtcagaaaaaaaaaaaaaaaaaaaaaaaaaaaaaaaaaaaaaaaaaaaaaaaaaaaaaaaaaaaaaaaaaaaaaaaaaaaaaaaaaaaaaaaaaaaaaaaaaaaaaaaaaaaaaggggggccgcccaaaaggttcaaagctaacttacccgtgcatgcaacttcaaaccccttcaaaagtgtcaccaaaattcaatt

SEQ ID NO: 2536 - DNA, 433 bp, Chlorella vulgaris
agggccggtccagaattaccgggtcgagccacgcgtccgcccacgcgtccgcccacgcgtccgcggacgcgtgggttttttttgagtcccgctggtgttacagcaatctgaccgtccgtgtaagctgcacggcaagcagagaagtacgagcaagggagtaacgaggtgggaaagcagagaagcagaccaggtgcaatactgcaaaagcgacaaaagcgggccagtgatgggaacagcatttcatgtgatcagagcaagacagctgcaaggcgcacccttagggtgcgggccactgtgcacatgtcaagccccatgacacactcaatggctcaaaaagcgcagcgcacagcgccacatgggtatgaagcaggacggcagagcagagcttcagtactccaaaggttgaaaaatcatatgatacacaaaagcatac

SEQ ID NO: 2537 - DNA, 430 bp, Chlorella vulgaris
gtaacggtcaggaattcccgggccgacccacgcgtccagattggacttgaaaggatattgcctggcagtgccgagcttggcaccatgcaggcgaccaggatgcaggtgaagcccgccctggcgtccagcttcttcaccggcagtaggatgaggctgcagtgcttctccacgcgggtggtgcggcccactgtgacagcagtacgggcagcagcagcagcagcagctgaaactgaggagaggtacaggttgaacaacctatcgccgcagcctggcgcacgcaagcagaagaataggaagggacgtggctatggtgcaggccagggtggcacctgtggtttcggcatgcgcgggcaaaagtccaggtctggcagcggcatccgccccggctttgagggtggtcagactccgctgtataggcgcctgccaaagc

SEQ ID NO: 2538 - DNA, 406 bp, Chlorella vulgaris
acgctgccaggtgacggtctagaattcacgggccgacccacgcgtcaggtgagcctgatacgtggtacttgtagcgatggcgggagacagactggaggttagcgtgaggttgcttcggcagggcggtgtgctgactgaagtgagggtatgttattgggacttggtagaggagctggaatcgcaggaattgtatcaggaagccctaatctgtacatgaaaccctcggtaggttctaggcaagctgtgtagggcgtggctgcttgccatgtgttggttgaaaacaacagttgggccctgagttattgcatatacatgtagaaatgtgtgtggtacgcttttgtatacaaaccttgtgaagttctatatgcgaggggtgctcggctgcccttctccttgtactggacat

SEQ ID NO: 2539 - DNA, 399 bp, Chlorella vulgaris
agcccacgcgtccgcggacgcgtgggcggacgcgtgggcggacgcgtgggcgaggagcgcgctgatctcatcgcttacatgaaggaggcgtgcaagtagatagcctactagctgaactaccatagcccaggacatatgggcgtacctcaaagacgcgactgccaagtagacggcggcccgacgccgccgtgctgccgctgtcgcagcacgctgcgctggcagccagtcttgtggggcatagtccccgtgggcttgtggttgatgaccgcatgatcaggattatgcggtggttgtgtggggccacgtggccaacagtttgggcagccacaattccacgcatgtgtggtttcttgtggagggcccaacgccaccctgggaatttggccaagcccctttttt

SEQ ID NO: 2540 - DNA, 408 bp, Chlorella vulgaris
aggtaccggtcaggagttcccgggtcgacccaagcgtccgcccacgcgtccggcttgctggagtagtgctggcagacccagaaagatgccccctaggccggcgctgtgtgtgcgttttggagtttacagcaccgcacaatttcattggctgaactgtgtcgcgagcggtcttggaaggagcccttgctgaagattgcagccatatggactcagctgtgtttcaggccagcagggtggccacagatggttctcaagtgataggcctgtgctgtgtggcgcagcagaaggttgtggcacctcctaaggccccgtaccatggctaagtgtttctgagcctggcctgctggctgatgccagtcgtgttgggatgcccagccgccagccagctcttcctcttgtacttgactg

SEQ ID NO: 2541 - DNA, 412 bp, Chlorella vulgaris
aggtaccggtcaggaattcacgggccgacccacgcgtcagcggacgcgtggggggcgtgctgaccggcgccggccccttcgcctgcctgcaggcacacctggctgaccccgtccacaacaacctgctcacaaacttcgcccgcgtgtacggcaattgagcacttggctgccttgtgctggaaagcagcatccggagcagcagggccgatgcggctgtctgtaacaatgtagtgtggggcttgcaacctttgcttggcccggcgtgaacggttgcttgttcgtgggtgggagcaccgcttgtaggcagacactgagaagaatgaaagaagtctaccaattttatatttgttgctttttgctagggtatcgggcatggcatagctaaccagctgtatgtaacggctgtttgcac

SEQ ID NO: 2542 - DNA, 447 bp, Chlorella vulgaris
gtgacggtctagaattaccgggtcgacgcacgcgtccaggactgccagggaaggggctgccacggcatatctgtggcggtaaactgtgccactaaagggcatagtgagctgggtgattggtgaagggtgctcagtgcgaaaatgtggcggcaaggggcaagggagactaagacgggtagtcgccgttacaggttgtcctgatgaggcggcagttggccagttccgctccattcaatataggcgtgtccgggccgctcttaagaccatgagtgcacactgtgggttcttttcaagcaagggtagatctcttttgctggggcagcactgtccctctttttcccacatgctgacgcctcattcccttctcggctgctgcgactgagttttccgagcgttttttgacgttgttgtgtgggaggccggtgtgaaatgcctgctgttcaagct

SEQ ID NO: 2543 - DNA, 442 bp, Chlorella vulgaris
ggtctagaattaccgggccgacgcacgcgtccacccacgcgtccgcccacgcgtccgggcggctggcggccagcgagcgcaaggaccctggcatggctgacaagcagtggcctcatgtggcctggcccacgcagcaacagtgtcctgcatgtcgcaagtcggacacattgtcagggcccaacagtgacatccctgactggctcgaggaggaggtttacaagtacctgaccggcttctatagcggcggcggccagtcaggggagctagggatgcggggaatgctgaggcagcggacaaagggtgccagctggccggaggctgcgctggtttgtggggtggtgggggcagtggtgttccttgtcctgcgaggcagccacaactatcggcttcggaagagcgagtcgcgccttctttgactgctttgctctgatcgatgatggat

SEQ ID NO: 2544 - DNA, 417 bp, Chlorella vulgaris
tacaggtctagaattcccgggccgacccacgcgtccacccacgcgtccgcaagcccaacagaccaacaagaaacccaccggaatttgccccttgaagggcccttccaataagggccctgccggtttggccccttccccaaggccccttaagccgcccaaccgtaaaaccgcccgaccttccaagccccccctgcaacaaaacggcgggaacaaggcttccacaattgtcctgcctaacgacaccaagctgaaccccttataaaaatctccggcacctgggtcggcatcggtgaccatttcgacacatgtgtgtgggccgcatactttggggaaaacacgctacccaactgcggccccgtggagaatttccactacaaacactgagatgtgacactgcccgacaccctgccccttgct

SEQ ID NO: 2545 - DNA, 395 bp, Chlorella vulgaris
ggtcaggagtccccgggtcgacccaagcgtcaggatgccggcatcacccgcattaagctgccctcgggcgccaagaaggtgatcagcagcgagtgccgtgggaccgtgggccaggtgtctggcggcggccgtaccgagaagcccatgctcaaggcgggccgcagctaccacaagtaccgcgtcaagcgcaacagctggcccaaggtgcgtggtgtggctatgaaccccgtggagcatccccacggtggtggtaaccaccagcacattggccacgcctccaccgtgcggagggacgcgccgcccggccagaaggtcggcctcatcgccgcccgcaggacaggtcgtatccgcggtaccgccattgtcaagcccgacaaggagtaaacgttggcaaa

SEQ ID NO: 2546 - DNA, 414 bp, Chlorella vulgaris
ggtaccggtcaggaattcccgggccgacccacgcgtcagcccacgcgtccgaacagacggatggtgcccctccagttcacgagcctggcagtcgtcacactaccattcacattgccgttcttgctggacctgcaagctgcggggacagccgctgtgttggaaggggtgggcggcatcgcagcgatcaagcgctcgcggcagcttatcaagcccatcagatggaagctggcagtgccctttgtgggcatagtggtggcccaacatgtgatgaactctgccaagggcttcctgcttggcaacctgccccccaggtactacctggaacttgtggagatccctgcagccattgccgtgctgggcacgctggccacgctgctgctgaccaggctgcaggacgtgctgccataaaccgct

SEQ ID NO: 2547 - DNA, 263 bp, Chlorella vulgaris
gggtcgacccaagcgtcaggacagctgcaacatgctgtggatgttgttctaattgattcttcccactctgttggttgggctgcaatgggtgatgtcatcgggagcagtcctgtttggctttggccagcctgaggagaccgcccttcaggtcgcctgagtgagatgccctctgccttcggaggcataaggcatccctcacacctgcttggtgttggagccaagggaagccaactgtactcgtcaaactgcctgcccaagccgcc

SEQ ID NO: 2548 - DNA, 391 bp, Chlorella vulgaris
aattcacgggccgacgcacgcgtcagagggtaacccatcagcagggattgaaggccaagaacaatggtcaggcacaacaacgtggtgcccaaccagcacttcaggaagaagtggcaggacaaagtcaggacctggttcaaccagcccgctcgcaagctccggaggaggaatgcccgcgccgagaaggccaagaaggtgttcccccgccccaccgcgggcgcgctgaggcccatcgtgcacggccagaccgtcaagtataacatgaagaagcgcgcgggccgcggcttcacgctggaggagctcaaggaggctggcattccctccaagcttgcccccaccattggcattgcagtggaccaccgccgcaagaacaggtcccttgaggggcttc

SEQ ID NO: 2549 - DNA, 349 bp, Chlorella vulgaris
cgggccgacccacgcgtccagtatttactgggtttcttcaccctgctcccttatctcttgttggagtccaagccccttcagcaaaagatccacgatgcagaccgcctttgtccgctccggcctccgtgccgccgtccccaccgctggcaagggcacccgccaggtgacccgcgcctctgtggagtggtacggccctgaccgcgccaagttcctgggtcccttcaccaaccccccctcttacctgaagggtgagttcgctggcgactacggctgggacacctctggcctgtccgctgatcccgagaccttctcccgctacagggaggtttaggtgatccatgccgggtgg

SEQ ID NO: 2550 - DNA, 177 bp, Chlorella vulgaris
cccgggccgacccacacgtccagcgacagttggcagaagccagcgtcaccacgtgttagcatccggcgaggccttcatgggtagaagctggtgcacagggctgagcccacgttcatcatgctgcgcttgcgagttttgtggttctatttttgcgttataccttaaccaccacaattg

SEQ ID NO: 2551 - DNA, 424 bp, Chlorella vulgaris
ccgggccgacccacgcgtcaactgagttcgtttcaaccttgtaatatcagagaggggcagctatggcggctgaggcagggaagcgacaaccaagcgcgcagatgacacagttcctggtccaggaacaagccaaggcgcagttgcagcagacggtggcaaggctaacagatgaatgcttcgataagtgtgtgggcaacccagggaactacttgagctcgcgggagcaggcatgccttgacaactgctcacggcgcttcctggagaccacacaattcgtggtgaaatactttcagtccaaggcaggcggcggccgagacagtgacttccactgaagaggcctacaagctgctgggctgccacataggatttgccagcaacagcgatgccgacgcgctatgtgtgtactagctctttgttgggtgac

SEQ ID NO: 2552 - DNA, 417 bp, Chlorella vulgaris
aattcccgggccgacccaagcgtcaggagggagcatcaccatgccggcgggacagggctacagggcccgcacgaggtatatgttccaacgccccttccggggcaagggatacattcctctctccacttacctgaccaactacaaggtcggcgagtatgtggacgtcaaggttaacggcgcagtgcacaagggcatgccccacaagtactaccatggcaagactggccgcgtgtggaacgtgaccaagcgggcagttggcgttgagatcagcaagaaggtgaacgggcggatcatcaacaagcgcatccacgtgcgcattgagcacgtgaggcccagccgctgccgcgaggagttcctgcaaaggtgcaaggagaacgatgccaagaagcacgcggccaaggtggcaggcgagcccca

SEQ ID NO: 2553 - DNA, 435 bp, Chlorella vulgaris
ccggttaggatatcccggctcgacccacgcgtacggcaaggcgaacagagcggaggtaggggcatactggagtaaatgggtatgcagttatggtctgtgcattgcactggggccagtgagggtgctgaggcctgctgctgctgccgctgccaaggcatgggggctggctagctgcaatggagcccacggcttccactctgtacgtgtgttagcaagggtggcaggtagtgcgaacaggactgatttcaaacccgttcgctatatgcttcgtagccagtgcttccataatgggtagtggaaacggagcctgataggctgaaagtctgcgcactgccttgaagtggcaagtccttgtcagcctttcgcagcaccaaagttgaatgattggacataacctgtgcctcaaatctgcaatgccgtcagtggggctgcctc

SEQ ID NO: 2554 - DNA, 172 bp, Chlorella vulgaris
cggtccagaattcccgggccgacccacgcgtccacggacgcgtgggctgaggaaggcagtgcatctgctgaggaccgaaacggacaatcatgcagattttctgcaaaacagacccgactcaagtccttgaacttagctccgacgccactgtggccaatgtcaaggctgccat

SEQ ID NO: 2555 - DNA, 457 bp, Chlorella vulgaris
ggtgccggtctagaattaccgggtcgaggcacgcgtccgcccacacgtccggccccatcctgtattccatgtgcgaatggggcgcagctgacccctggctatgggcatcccaggtgggcaactcgtggcggacgactgaggacatagaacccagctggtactcaatcttgcataacctggacaacagcatcggccttgcgcgctatgcggggcccggtgggttccaggacctagacatgctggaggtggggaatggcgaccttacccttggcgagcagcgtgcgcacttcgcgctctgggctatgatgaagtcgccgctgctcatcggggcagacctacggcgccttgaccccgactcgctggctatcctcaaagccaaggagctgttggctgtgagccaggaccccctgggagcccccgctgatttgatatgggagaaggggaccaaagggatttt

SEQ ID NO: 2556 - DNA, 433 bp, Chlorella vulgaris
aattcccggctcgacccacgcgtacggatttttgagatgcccaccggcggcgctgccatcatgcgccagggccccaacctgctcaagctgtcccgcaaggagcagtgcatggccctactgacgcagctgcgcaacaagttcaagattaacggcttcatttaccgtgtgttccccaacggcgaggttcagtacctgcaccccaaggacggcgtgtaccccgagaaggtcaaccctggccgcgttgccgctaacaccaactctcgcaggattggccagaacgtgcagcctatcacagtcaagttcaccggcaagatgccccaggacttctgagcagccttagcatcttggtagcagccgcagccggccttggtagcttgtgcagcctagggaaggatctgggcggcgccttgttggcagcagcagtggtgccccg

SEQ ID NO: 2557 - DNA, 445 bp, Chlorella vulgaris
ggtacaggttatgaattcccggctcgacccacgcgtacggattgacaccatcgccatcaccaagggccacggcactgagggtgtggtgacccgctggggtgtgtcccgcctgccgcgcaagacccatcgtggtctgcgcaaggtcgcctgcatcggcgcctggcacccggcccgcgtgtcctggaccgtggcccgcgctggtgccatgggttacaaccaccgcacggagatgaacaagaaggtgtaccgcgtgggcgtgaagggcgacgccagccacaaggccaccaccgagtttgatgtgaccgacatggacatcacgcccatgggcggcttcccccactacggcgaggtcaaggaggactacatcatgatcaagggtgcgtgccccggctacaagaagcgcgtgatcaccctgcgcaagaccctgttcccccagaccagccgc

SEQ ID NO: 2558 - DNA, 249 bp, Chlorella vulgaris
aattcccgcctcgacccacacgtacgggccaacatgcgcgcgaagtggaagaagaagaggatgaggcgtctgaagaggaagcggcggaggcagagggcaaagtgattgcacagccccgcctgcaagcgagcggcctgcagccttggaggatgcagcagccagctgcgtgtgcgcccgatagtctgacagcgctctttaatgtaacatctgcgcgtcgcaaaagaaagaaaaacaaaccgaaaacacacc

SEQ ID NO: 2559 - DNA, 351 bp, Chlorella vulgaris
ggtaccaggttacgaattcccggctcgacccacgcgtacggccagctggcaggttccgtgcctggggatcgcgctgggcctcgcgtgggccttgcctttcaaacggttggtgtgggcggcgtttctggcggcgtttagggtctcttgcagacccttggtcgttgtgcaggccccagatgtcgctgtatcgaacccagctggcggtgccctgttgcggtgcttctggctcactgtggttctgaggcagcagtggcagggttgccagagtgtgtcttgcacctgtcggtgttgcacgcggggtgcagcacttacgtagctgggacgccaccttgtaagtttgattgttcaaaa

SEQ ID NO: 2560 - DNA, 371 bp, Chlorella vulgaris
aagctcttggggtattaaagtgtgttgttccaatcagattacatccattggagtctttggctgcgaggcgacacatagcagtatggagggcgggtttgagggcggcccagcacgcccgcctcctgtgcccaggatggtgatggactttgtgcagtacttttacaggcatatcagggagcgaaacgtgcgtgagtcttgggtgatgtacagccacaccttcccccacctcagcgagcgcttctttaagggcaccgcctggcccacggttgacgtcatctctcacctggcagacgacgatcacatcttctgcatcctctacaaggagatgtactaccgccacctgtatgccaacgccaagcccacgctggctc

SEQ ID NO: 2561 - DNA, 406 bp, Chlorella vulgaris
ggtctagaattcacgggtcgaggcacgcgtcagggcgcaaccgtgaatgtgggtgtcgacccctccaaggttgtgatcaccaagctgaagatggacaatgacaggaagaacctccttgagcggaagaagggcggcaaggccgagggcaagggcaagttcaccgagagcgagattgttgccatggagaatgtggactgatcagcacgcacttagtgcacagcagcggcggcagcagcggcggcggcggcgcctctcgcgcttgacacagcccttcctcgcgcatgtgtgcccaggagcggcagcaggccgcccagtctgtttgcggtggctggtgttcttgcggggcaggtggaagactttgcagcggcaggggtgcctgctttggagtcttctgcacgctgtggcc

SEQ ID NO: 2562 - DNA, 433 bp, Chlorella vulgaris
gaattcccgggtcgacccacgcgtacgactagttataagtagcaagctcgactctagcccttcccactagctgcattcctgtctgatcattgccccagggagagctacagcttacggtttacggggcagagcaatgcggaggcttcaagacctcactcgagcggtcaggctcgccttccgccagcaggcccgcactgcttccagcgctgctgccaacgcccctgccaccgcagaggtggcagtcgcaagcggtgtgcccgacctgagcgctgggcggaaagtcatcatcagtgcgccggccaagacagccggccagcacggcaatttgctgaccgctgaaggtggtgcacctgtatggagaattgaactcgagaacaccaactccaagtggattaatgggctcatgggctggacctcaaccagtgacccctgg

SEQ ID NO: 2563 - DNA, 422 bp, Chlorella vulgaris
cggtcaggaattcccgggccgacccacgcgtcagcccacgcgtccgaggcgttcttggcaccatggctgagaagtcatgcacgatcaggacacgaaagttcatgaccaaccgcctgctgcagcggaggcagtttatccttgatgtgctgcaccctggccgtgccaatgtctccaagactgagctgcgcgagaagctgtccaagatgtacgacgtcaaggactccaactgcgtgtttgtctttggcctgaagacccagtttggtggcggcaagtccacagggtttggcctcatctacgacaacgtccagggggccaagcagttcgagcccaagtacaggctcatcaggaacggtctggcgcagccggtgcagaagtcgcgcaagcagcagaaggagcgcaagaaccgcaccaagaccatccgc

SEQ ID NO: 2564 - DNA, 436 bp, Chlorella vulgaris
aattcccggctcgacccacgcgtacgcccacgcgtccggagcgaccatgctgaccctctttgcaaagaacctccttgctcaggcgggccctcaagcagcacaaaacgcgctcaaggccagtgccgtccttggattgcggtgctatcacaagaacgtggtggaccactatgagcgccccaggaacgtgggggcctttgacaagaacgaccccaacgttggtactggccttgtgggcgcccctgcctgcggggatgtaatgaagctgcagatcaaggttgacgagaatggcaatatagtggactcttgcttcaagacttttgggtgcgggtcagccattgccagcagcagtgttgccacagaatgggtcaagggcaagtcgatgaatgaggtaatgaccattaagaactccgatattgccaagcacctgtcgctgccg

SEQ ID NO: 2565 - DNA, 423 bp, Chlorella vulgaris
aattcacgggtcgacgcacgcgtcagcggacgcgtgggcggacgcgtgggatcaaagtaagcagctacttgtaatatggcgtacatggctggtcatatggtggctggggcgaatcgctccttcacccagcaggtggccatcgatacgcagcgagctggctcgcgcagatcccttcggagcgtcactgtaatgagcggccacggccggttcctagttggaggcaactggaaagctaacgggaccctagcaagtgtgaaacagttggtggcggacttgaacaagggcgacgtgccaccggaagtggaggtggtggtggcccctccctatgtgcacctggacgcagtgcggcagagcctgaagcctgagtacaaagtggcagcacagaactgttgggacgggcaaacctggtgcctttacggggga

SEQ ID NO: 2566 - DNA, 362 bp, Chlorella vulgaris
gggcggatcatcaacaagcgcatccacgtgcgcattgagcacgtgaggcccagccgctgccgcgaggagttcctgcaaaggtgcaaggagaacgatgccaagaagcacgcggccaaggtggcaggcgagccccacctggtgaccaagcgtcaacccaagggcccccgcaccgagggcttcacccttgagaatgtgaagatgcagaccatcaccgctatcccctacgatatcctcaaggagggcgtggtggcgtaagcagcagcagcacagcagcgctcgctcttgcgggcggtggcagcctccttgcttttcctgccaatgccgggggcgccagcggacaggatgtaacaagctcacctcgc

SEQ ID NO: 2567 - DNA, 390 bp, Chlorella vulgaris
ggtactagtctaggaagtcccggctcgacccacacgtcacggggcggatcatcaacaagcgcatccacgtgcgcattgagcacgtgaggcccagccgctgccgcgaggagttcctgcaaaggtgcaaggagaacgatgccaagaagcacgcggccaaggtggcaggcgagccccagctggtgaccaagcgtcaacccaagggcccccgcaccgagggcttcacccttgagaatgtgaagatgcagaccatcaccgctatcccctacgatatccccaacgagggcgtggtggcgtaagcagcagcagcacatcagcgctcgctcttgcgggccgtggcaacctccttgcctttcctgccaatgcccggggcgccaacggacaggatgtgac

SEQ ID NO: 2568 - DNA, 440 bp, Chlorella vulgaris
cggtctaggattcccgggtcgacccacgcgtacggccccttcagcaaatgatccacgatgcagatcgcctttgtccgctccggcctcagtgccgccgtccccaccgctggcaagggcacccgccaggtgacccgcgccgctgtggagtggtacggtcctgaccgcgccaagttcctgggtcccttcagcaaccccccctcttacctgaagggtgagttcgctggagactactgctgggacacctctggcctgtccgctgatcccgagaacttctcccgctacatggaggttgaggtgatccatgcccggtgggccatgcttggcgccctgtgctgcgtcgtgcccgagctgctggaccgcatcgggaccgtcgactttggcgaaaaacccttgtggctcaaggctggttccgccatctttggtgatgacgggctcaacta

SEQ ID NO: 2569 - DNA, 406 bp, Chlorella vulgaris
cggacgcgtgggtggaccttaaacacgattggttatggactgtgtggtgctgggagcgagttgagtttactcctcctgtgtgcactggggctccctaatcccactccccatgtgcactggttggacgggttttgggagtttcccgtctgacacccatgcaccccagccccagatcgaaccccagccgatatactagctgggcggcttggagtaggcgcccaagttgaggattcaagtctccatatccatgaaagcgagggctagcgggccatgtgatgaaggggtggcggccagctagcagcgctcgagtggtgcatgccatcaaaccggtcactgtcagtgtgtcaatcctagctgtgatttcaagacccaaggtcgttccattgtggtggggatccagtggttc

SEQ ID NO: 2570 - DNA, 414 bp, Chlorella vulgaris
ggtcaggagttcccgggtcgacccaagcgtcagcttttccaattgccaaaacgcaatttgctgttgcaactatgtccggccaggtccttgcgccgtcgtcattcatccagcgctccgtgcagcgtgcattcccggctaggaggccggcgaacgctcgcgtagtaaggatggctgcccaagcaactgtcaagctcagccaggacgagctgaaaaagcaggccgcctggaaagccgtggactatgtcaagagcggcatggtggtgggcctgggcaccggctccactgcagcttttgcggtggaccgcatcggccagcttttgaaagacggcgagctcaaggatattgtgggtgtgcccacatctatcaggacctatgaacaggccaagggcctgggtatccccctagccaccctgg

SEQ ID NO: 2571 - DNA, 397 bp, Chlorella vulgaris
accggttaggtattcccggctcgacccacgcgtacgcccacgcgtccgccaagatactccgtatctcacgtctacatctggtttcagctgctagtttatcgcttccctgagccgcagctcctcggagcaatgtcggcttagatgcctctgggtgcagcctagagaggacgaggtatggacgctcccataagcaagtggcgtccggagcctgactcgtcagatgatgagctgcctagccgcaggactctgcctgagcctgaggctacgtgcgaggctgaggaacctgcagaacctgagcagcaggctttgccccctgacgaggcggtagcagcgtcagctgcttgcccctcggctaagcctaagcgtcgccgtaagcgccggggcaagggccatggtg

SEQ ID NO: 2572 - DNA, 441 bp, Chlorella vulgaris
ggtacaggtcaggaattcccggctcgacccacgcgtacggcgggtcgcaatcctgcggcctgcggcgactgagcaggccccctggcagtggccagggttggggcggctagcggcctgccagcgatgcagcaatagccggcctggggtatgaaggtggcgcgctctggcggcgtgcgcgcccctggggccctagcaaggctgtgcgagcggagcagcaggcagcagtgtgccttagcctgccgcgcctgaggcggctcgctttgataaccacaagcctacaacatatgttctatagcactgccgcacgcttgtcacctgacacgagcagtgccctaggagcctttgattttcgtgggattgtgggggcagggcggtgacaatggggctcaattgcacccggccggctggaccgaggtcttcagtgttgcttttgcacacttg

SEQ ID NO: 2573 - DNA, 136 bp, Chlorella vulgaris
acggcatgctggtcagccgaggttgaagctttgctgggcaagtcgtgttcgagatcttgccagcttcgtctgctttggacgaaggcagagactgctgctatatgtgtagcgttactgtaaccagtccacatgaaaa

SEQ ID NO: 2574 - DNA, 406 bp, Chlorella vulgaris; identical to SEQ ID NO: 2538

SEQ ID NO: 2575 - DNA, 360 bp, Chlorella vulgaris
gaaagcagttatgagaggatgggtatgctggtgtctgttcctggcgagtctcctgtggtgcatagtcgtgccggggtgcctgctcagcagatggatgcgaggtgccgtctactagccgactgtcatcactaacccatccctttcattgtcgctgctggcaaggcctgaggtgtggttattcatgatttggcttgtgcagtctcctggaggcaggagctgctttccttgccctttttccccgctgtttcaagagcatatctcggtgcctcactctctgttgctgcgcatgtgtcatagggtgtgtgtaccatatctgttcctgggcctatggcccctgtgtgaaagttgagcaaagaaaaa

SEQ ID NO: 2576 - DNA, 453 bp, Chlorella vulgaris
cccgcccaggtactagttaggaattcccggctcgacccacacgtcagcccacgcgtccggacggctccttcgtgctcatccttccccaaccaactgcagcagcgccaacaccatggccgacaacaaggagcctcgcttcctcatctacggtggccgcaagggctggatttccggcctggtgggcgagctgctggaggcccagggtgccacttaccactttggcaaggcccgcattgaggaccgccacgccgtgctagaggacatcaaggagttcaagcccacccacatcctgaacgccgctggtgttactggccgccccaacgtggactggtgcgagacccataagattgagactatcaggtctaatgtcatcggttgcctgactctggccgatgtgtgtctctccgaaggcctgcatatgacctactttggcactggttgcatcttccacta

SEQ ID NO: 2577 - DNA, 394 bp, Chlorella vulgaris
aggtacaggtcacggaagtcccgggtcgacccacacgtccgccgagcgctacatctcttaattagtttctggatgcctgacagacctgggaggtgggtatgacctaagcagtgggtgacaaaatttgcgacatgtatggccgcaggttcccacaactgtgacagcaaggtccgcaaagcctcaaggaggcctcctaggtgaagttcactttgatgactcccttgggaaccgcgcgcatcgtgccaccagcatttcgtttctgaatgttgatcgtacggtcttcagcctatctctgcctgcattgcgctgtacttccatgactgtttcatttcggggcagctgtgcgccttattttgatgtgtacttggccttggtcgtagttatatactacgct

SEQ ID NO: 2578 - DNA, 318 bp, Chlorella vulgaris
aatttgtgcctacatgcttcccctttgtgcttatgagatgattttcacccaccacctttttgcactggtggacgccgttggtcgtgtgaagtgaaaaccgtcgaattcttcatatgcctaggcgcctagcgcgtgcacgaaagtgatggtagcgaaccccttgcctgacagttttgaaactatgagaagattttccaagttgctcattgcccagcactgccgttgatgtaagaagctcatggacaaaaaaaaaaaaaaaaaaaaaaaaaaaaaaataaaaaaaaaaaaaaaaaaaaaataaaaaaaaaaaaaacaata

SEQ ID NO: 2579 - DNA, 437 bp, Chlorella vulgaris
aattcccggctcgacccacgcgtacgctgtaatcttgcggtccctgggagctttctacttgcccagagccttcctccttttctaaggcttgggcacccactggcggttgtacccctagggcctcctcgctgcgtccttaataaatatcaacatgcagactacccagctagaccgcacggctttcgttgccggcaactgcccgcatgccagtgcacgtacccggagggctgcccgtggcaggcaccagctacgagtgtgcgctgttgccgagcttgagaggctggcgaccgcaaggaaccccatggccgggtaccctgagggcacccctgtcgtgcctccccaggacctcctgggccgccctcgccgcaaccgcaagagcgagacggtccgccgtgctttcagcgagaccatcctgcgcccggagaattttatcctgc

SEQ ID NO: 2580 - DNA, 433 bp, Chlorella vulgaris
cccggctcgacccacgcgtacgcaagctgtaagctccagacacacattggctagggcgctgtattaagtgatcacaccggttgagcaagatgatgcccggcggtggaggcagcgttgttgttccgaggaatttccgtctccttgaggagctagaaaaaggagaaaaggggttgggcgatggaacagtcagctatgggatggacaatgcggacgacatgcttatgcggcactggacgggaaccataatcggtcctcctgggacggttcatgatggaaggatatataccctaaagatttactgcgatgagcaatatcccaacaagcctccggcagtcaagttttcaacacgggtcaatatgtcttgtgtagcgtccaatggagtggttgatccccgcagtttccacatccttggcaactggaaacgcaactacac

SEQ ID NO: 2581 - DNA, 388 bp, Chlorella vulgaris
tgccggtcacgaattaccgggccgacccacgcgtcaacttggctgcgtcgtgcccgagctgctggaccgcaacggcaccgtcaactttggcgagaacgccgtgtggttcaaggccggtgccgccatcttcggcgatgacgggctgaactacctgggcaacccctccctcatccacgcacagtccatcgtggccgtgctgctctcccagattgtgctcatgggcctggttgagggctaccgcgtgaacggcggccccgctggcgaaggccttgacgccctgtaccccggcgaggcctttgaccccctgggcctggccgacgaccccgacagcttcgctgagctcaaggtcaaggagattaagaacggccgcctggccatggtgtccatg

SEQ ID NO: 2582 - DNA, 349 bp, Chlorella vulgaris
ttttgttcgctgcgtcagactggttaaaatgatgaagaagggatcatatcgctcaaaacgcatatttgtgacaaacacagctctgggtatccctctctgccactcacagtcgccaattccacatgtgaaacatgagcaacactatgatgacagcaacacatggcattgcaacccttccatggcattcccactgctggcagcccttgctatatacaatcctgacgtatatacaacgaaccatgctgcaagctcagcagaaggcttgggtgtatcatgcgcctatccaccacatgcatgagcaaccgaaatgggagagcaagattaggcagagaagctaccaacaaaatgc

SEQ ID NO: 2583 - DNA, 124 bp, Chlorella vulgaris
taccggtcaggaattcccgggttcgaccacgcgtccgccggacccgtgggcttcgcccgacaaaatgtcaagccaacttgtgtggaaccttgtgaagcacaacaacgcattccttgtgaagggc

SEQ ID NO: 2584 - DNA, 170 bp, Chlorella vulgaris
ccagggaattcagggcagaataagggaaacctgcggatgaggattgagatcgagtgagcccatgacgcagctgagccacatgaagggccagcaacttcacaggatgctgtctgacatgtaatgatgggggcctactccactgcagcatagagtctactgcaccacggcaa

SEQ ID NO: 2585 - DNA, 445 bp, Chlorella vulgaris
aggtaccggtcaggaattaccgggtcgacgcacgcgtcacgcgtccagcgcatgcgtcggggatgagccgcgcagcgatcaccagcggtggctgctgcagtgtgcgcagcagatttgggagaagttctctgagcagttcttgcggctgtggactgagcagggtcggggcgatgcctacccagacaccttgtttgggcgggaggcggaggggggccccgcagcactcgaggcagcgcagagcgccttcatggctgacctgtggcgcgacgctgtgggcttcatgggcgctgtcatgattcgccgcatggtgggcatccctcatgtggctgagatgaagtgcatacaggaccctgacgtcagggctgtctgcgagcggcgggtgttgcacctgggccggcggctgctggtaaagactgccagcttcaggtctatccaggatgtggtt

SEQ ID NO: 2586 - DNA, 419 bp, Chlorella vulgaris
  unsure (1)..(419): unsure at all n locations
taccgttaagggtaccgcaaagcaggcagcgaagaccgtgaagaaggcggccatcaagaccgcaaagaaggtcgcccccaagaagggtggcgtggagtggtacggccccaacaggcccctgttcctgggcccctacagccccgagcccccgagccacctgaagggtgagttcgctggcgactacggctgggacacctccggcctgtccgccgatcccgagaccttctcccgctacagggagattgaggtgatccatgcccgctgggccatgcttggcgcgctgggctgcgtcgtgcccgagctgcttgaccagaccaaccacgtgccctggttcaaggctggcgcccagatctttgcccccgagggcatccagtacctgngtgtggatggcctgatcaatgccaagagcattgtggcca

SEQ ID NO: 2587 - DNA, 370 bp, Chlorella vulgaris
actgaatggcgaattccatgtacaattggtaacagctgtcgtgcgtgggagtggctttaccatgacagtgtcgctcttgacactgtcgcgagcgccatttctagctgcacccgcagcacaaacgaggcaagatacgccgatacgacgtatatcagcgctttctgagcaccgaggcagcagcaacagcggctcctcagggccaggcaggccacggaagcacaacaagaaggctcgggcacctggactgtttgaggttcaggacatcagcccaaccaagccgtctctgggcatacatgccttaacgccgactacacataacggggacgagatagaggtggatggcaccagctacgttgtgcagagcgtggtg

SEQ ID NO: 2588 - DNA, 454 bp, Chlorella vulgaris
ggtacaggtctagaattcccgggccgacccacgcgtccaggaatcccccgtcgacaacaggtccaaggttcacaagatgcagaccctctctgcccgtttcggcgtccgcgcccctgtctcccggggcacccgccaggtgacccgcgcctccgtggagtggtacggccccgaccgcgccaagttcctgggccccttcaccaaccccccttcctacctgaagggtgagttcgctggcgactacggctgggacacctctggcctgtccgccgattccgagaccttctcccgctacagggaggttgaggtgatccatgcccggtgggccatgcttggcgcccttggctgcgtcgtgcccgagctgctggaccgcaacggaaccgtcaactttggcgagaacgccgtgtggttcaaagccggtgcccccatcttcggcgatgacgggctgaactacctg

SEQ ID NO: 2589 - DNA, 384 bp, Chlorella vulgaris
cccacgcgtccgaagaagttcaacaagaaacgctgcattgctcttgtcggtacatccaaggaaactcgcaaggcgtacaacttctagctgttccagctcaagatggcagcctgcaacgacgcaccaggttccaacgatatgaacgtgctggagcaagcagttgagggagtgaaggaggcaactgggttagcggcccagaaagtgctggagcatataccaggcaccgcagagcatgccgtcaggagggatgcgaagcagctggacccagaaacgttcacctgtcgatcaggagctgttcgtttcaaggatgatgttcagccttcggacgagaagagaaagacgctgacgaggcagaacacgcccttcatcaagcccgggcagcat

SEQ ID NO: 2590 - DNA, 114 bp, Chlorella vulgaris
cccacgcgtccgaaaaaaaaaaaagaaaaagggcgtgtgcacaattcgattcagccttacttaaacatgcaatcaaaagtcatatctcttcaaaagggtcacgtatcttcaaat

SEQ ID NO: 2591 - DNA, 347 bp, Chlorella vulgaris
ggtaacggtctagaattcccgggccgacccacgcgtccagccaagcatccgcattgcgatgcactgggtggaggtgacgcgtggtctggacctgaacgacccctgcaaccaggactttgaccccatgttccagggcaacaagctcaagcgccatgaggttgggtaccccggcttcaaaatctttgtgtccggcgacatggatgaactgaagctgaaggagattacgaaccgccgcctggccatgcttgcctttgccggctttgtgatggcggcgcaggtgacagggctcaatccgctgagatcgctggggcatcacctcgcacagtccatcaacaccaccatgttct

SEQ ID NO: 2592 - DNA, 415 bp, Chlorella vulgaris
tatgtgcgtacctctgaagggtgctaatgctcacatgatgtgttgacttgcttacatgactttgcatgtggggtttacgagcctctcaggcaaaagcgtgacagtgagaaggcagcgaattgtcagtgttggggcttccatgttgctggaacacctaccagcgctcaaccagaagcgccttgtcctggcctcagcctccccacgccggaaggagcttctgcagcagctgggattgaagtttgaggtgatcgtgagcagcttcgaggagaccttgtcaaaggacagtgtgactgcagcagagtatgccaccgccacggccactcacaaggccctggacgttgcgcagaacctgctggcaggccacgcacacctggtcattggtgcagacacagtggtggagtacgatggccacatc

SEQ ID NO: 2593 - DNA, 246 bp, Chlorella vulgaris
ttcccgggccgacccacacgtccacccacgcgtccggctgcaagtattggtgtgctaagtaaagcttgtcagcatgggcaagtgcggcaagggaactggaagctttggtctgcgtcacaccaacaaccacggcctctgccgtcgttgtcacaggcgctccttcgaccggcagaagagcacctgcatctcttgcggatatcccgctgctaatatcaggaagtacaactggggcaacaacggcatccg

SEQ ID NO: 2594 - DNA, 299 bp, Chlorella vulgaris
ggtcaggaatacccgggtcgagccacgcgtccggtcgaatctgcggatagcgagtacagctttgtgattaccaaccaacgctgctgaacgcacggtcttccagatatcccggctgctcatcagcatcaagcaggaactcaaggagatgctcagcatcatccccatgttcttttgagaagtgacctacgtatgactggagtccatgccatcatttcaccgttcattagaactgggtagacacagcgtggcagcagcgccagcactgtttgtagttgttgtcattcattctctgtgttcct

SEQ ID NO: 2595 - DNA, 412 bp, Chlorella vulgaris
tcccgggccgacccacacgtccaaatgtttgctgacatccggttacttgctgctccacgtgttagaagcctgaccaccgatgtgagcagagcttgagtgcagcagttgccactgagcagttcggcctggcagacatcgagcatgagtggtttgacgtggtaaattacactgacactgtcataagcatggggacgaggagcgtgtgccatatgaagggtttgctccaccgaacctgctatgtttgggtactcaatccagcaggcgacctgctgttgcacaagggcaccccgctcaagagccttggcccaagccagtgggatctgaccgtggcggagcacttgcatccagccgagatttatcaccaaagtgacgttccggggccccagcacgacctgggggtcagcctcagcca

SEQ ID NO: 2596 - DNA, 373 bp, Chlorella vulgaris
tatgtttgttagtttctttatttgtgctccacgtttagaagcgtgaccaccgatgttagcagagcttgatgcagcagttgccagtgaccacttcggcctggcagacaacgagcaggagtggtttgacgtggtagatgagactgacactgttataagcatggagaagaggagcgtgtgccatatgaagggtttgctccaccgagcctgctatgtttgggtattcaacccagcaggcgagctgctgttgcaaaagcgcagcccgctcaagaaaattggcccaagccagtgggatctgagcgtggcggaacacttgcagccaggcgaaacttaccggcaaggtgcggtgcgggggctccaggacgagctgggggtc

SEQ ID NO: 2597 - DNA, 329 bp, Chlorella vulgaris
gacccacgcgtcaaggagaaccgggagcacaagctcaatcgccttgtagcttcgcccacctcctatttcatggacgtcaagtgccaagggtgcttcaccatcacgaccgtgtgcagccactcccagacggtggtggtgtgccccagctgcaacaccgtgctgtgcgtgcccaccggcggaaaggcccgcctcacagagggctgctccttccgcaggaagggcgattagtcaggggacgtcccacgctggcatgtggtcccaagaaagtgcgccgccgcgcgcttgaggactcttgcgaccgggacagcgcggcctatcaggacaggaac

SEQ ID NO: 2598 - DNA, 345 bp, Chlorella vulgaris
gggtccacccacgcgtccggacacgatgacaaagaagaggaggaactcgggtcgcaacaagcacggccgtggccatgtgacccgcgtgcgctgcgaatcctctggcgtgctggtccctaaggacaaggccatcaagcgcttcattgtcaggaacatcgtggatgcctccgccatccgtgatatccaggacgcttgtgctattgatgggtatgcgctgcccaagctgtaccgcaaggtgtattactgcatcagcgcggctatccactccaagattgtgcgcgtgcgcagccgcaagaacaggcgcaacagggagccgcctgcacgccctggtttcgggccccgccg

SEQ ID NO: 2599 - DNA, 390 bp, Chlorella vulgaris
  unsure (1)..(390): unsure at all n locations
cggggccacccacgcgtccggagcaagaagaaggcgttcaccaagtacgtgaagaagtacgctgatgggcgcaaggagattgaggcgcagctggagcagctgaagaagcactgcagcgtggtgcgcgtgattgcccacacccaggtcaccaaggtgcccatcggccagaagaaggcgcacgtcatggagatccaggtcaacggcggcagcgtggcccagaaggtggactttgcctacggcctgtttgagaaggcggtgcccgtgagcaccgtgttcagccaaaacgagatgattgacaccatcgccatcaccaagggccacggcactgagggtgtggtgacccgctggggtgtgtcncgcctgccgcgcaagacccatcgtggtctgcgc

SEQ ID NO: 2600 - DNA, 399 bp, Chlorella vulgaris
ccggtccagaattcacgggtcgacgcacgcgtccgaccacgcgtccgggagacgctgtatgagtacctgctgaaccccaagaagtacatcccaggcagcaagatggtgtttgctggcctgaagaagcccgaggagcgcgctgatctcatcgcttacatgaaggaggcgtgcaagtagatagcctagtagctgaactaccatagcccaggacatatgggcgtacctcaaagacgcgactgccaagtagacggcggcccgacgccgccgtgctgccgctgtcgcagcacgctgcgctggcagccagtcttgtggggcatagtcccgtggtcttgtggttgatgaccgcatgatgaggatgatgcggtggttgtgtggggccacgtggccagcattttgggc

SEQ ID NO: 2601 - DNA, 403 bp, Chlorella vulgaris
ttcgcgggtccacccacgcgtccgaagcgcattcgccagtagctgaggcgccagggctagcaccagcagtggcacccgtcccggctgcggcaacacctgcggagtctgatgggaagttggccaggtcaggtcctgacgctgccggggacccagtggcggtgcctgagggccatgtgcctgccgagccacaggtctacaccctgcagctgaggttcactgatggcacccccctcaaagtggacctgcaagggaccagccagctggcagaggtctttgcagccgcagaccgtcaccgagcagcccagggcaaggcagccgtgccgtatgtgctggtcatgccccacccgaggcgccagtttggcccggcagagcagctgcaaacgctgcagcagctgggcataca

SEQ ID NO: 2602 - DNA, 468 bp, Chlorella vulgaris
ttcgcgcggtccacccacgcgtccgcagacgcgtgggcggacgcgtgggcggacgcgtgggcggacgcgtgggtcatccaggcacttgtgaccgggaagtcgcccctggagaacctgtccgaccacctggctgaccccgcctccaacaacggcttctccatcctgaccgccaccaagttcaccccctgaattcagccctgaattttgagggaaatcccctggctgctgctagttcctcgttgttctagctcttggttggttgccggtgtgtcgctgttgtgtgaaggggataggcgtgaccccttggttgtctactggcagcatcagcagcacccagcagctggacggtcgtattgagatgtgtgtgacgcggcaaaattcgtaacgcacgaggaaccgagaagagcacctttaattccccctgctggttggaattttgctgcattttcacggtacactggcgggctg

SEQ ID NO: 2603 - DNA, 406 bp, Chlorella vulgaris
attcgcgggtccacccacgcgtccgcagacgcgtgggcggaggagcaccttacaatggctccttcagggaagaaggatactaaggccgccaaggcggcaaaggccgtcaagaagtcccaatggaagaagactcgcaagccccgctacagcgtggtcttccacaggcccaggacactcatccgctccagggaccccaagtaccctaggcagagcgctccctccctgcccaagatggacgccttcagcgtgatcaaggcccccttgaccaccgagtcggccatgaagaagattgaggacaacaacaccctggtgttcctggtggacgtgcgcgccaacaagaagcagatcaaggacgccgtggcccgcttgtatgacatccagacgcgcaaaatcaacaccctcatca

SEQ ID NO: 2604 - DNA, 321 bp, Chlorella vulgaris
gtccacccacgcgtccgcttaagtcttgcaacttcaagtagctatcatggcccccctgagcacctccacaaagcttgtggccgccggccgggtgtcccttcgcaaataggccaaaactcctcgtcctatgcgcgcaacacgcctagtgtgcacgggagcaagggacgcatctgagacactgaagaaagtcaccaagatcatcgctatccagctcggcactgacaccaatcatgtgaagccatagtcggactttgcaagactgagtgccgaatccctcgaagttgtggagattatcaccggccgatacgaggagttttgcac

SEQ ID NO: 2605 - DNA, 436 bp, Chlorella vulgaris
cgggtccacccacgcgtccgcacacgcgtccggtcggagcggctggcaacatggcgaccgagattaagttgttcggcaagtggagcttcgatgaggtggaggtgaacgacatctcccttgaggactacattgccgtgaagcccaagtatgcgcgcttcaccccccactctgccggccgtttccagaagcgccgcttcaggaaggcgcagtgccccattgtcgagaggctgaccaactctctgatgatgcacgggcgcaacaacggcaagaagctgatggcggtacgcatcgtcaagcacacctttgacatcatcaacctgctcaccgaccagaaccccatccaggtcctggtggacgccatcatcaacggtggtccgcgtgaggatgccaccgcattggctccgccggtgtggtgcgccgccaggctgttgatgtg

SEQ ID NO: 2606 - DNA, 177 bp, Chlorella vulgaris
gggtccacccacgcgtccggaccgaacagctggccgccacgttcctggtgacagagggaccgtcatgcagattttcgtcaagaccctcacgggcaagactatcacccttgaggtggagtcttcggacactattgagaatgtgaaggctaagattcaggacaaggagggcatcccccc

SEQ ID NO: 2607 - DNA, 420 bp, Chlorella vulgaris
gggtccacccacgcgtccgcacacgcgtccgcccacgcgtccgggggttttggtggagggtggcgtgtggcttgggcgccctgggtctgctgtggttggtgacgcatgcgagaagctacgataaacctccgttttgccagtatgtttagtcttggtatatatgtttgagctgcagcgtttggcttctgctggcgtactctacgtacctttgatgacacacgtgcttcttgttgagaacttgcttgcctttacccttgtagctggtgttggctctgccctttgtctagtaccctctctgccttgctattgtatgggctccacaatatcatcgtgggctccagacgaattgcattccggtatatagctttcttgtctggggctttgcagaacgccttgcagctcgttgcatttcgttagttt

SEQ ID NO: 2608 - DNA, 414 bp, Chlorella vulgaris
  unsure (1)..(414): unsure at all n locations
cgggtccacccacgcgtccgcacacgcgtccgcccacgcgtccgatcaggatatagcccatgatatatcgttggctactccggaatgaatgatggaggtctctctcgtaccccctgtgttgtcctcagtgttgctggaactcttgcaagtggtttacactgtgtttagtcnccgcgctgcgccacattgcaacctgcggcgttggtcatccagtccttttaatttgggtgcggtctatagggcttggacaaccttgccctgcggctggcaagcccgggttttgtttggtggatgcttgtttctctgtatactagttgacgcctccggctggtaatctcacggtccacaattcttctggctgttcataaagagtcctatgtctctctcctgcctttgtaaacctcattgtcggat

SEQ ID NO: 2609 - DNA, 222 bp, Chlorella vulgaris
ggactgccaacgttacagcaggggtcgagacagacgacctccgaccccaactgctgcccagagtcagtccagagaagcaggacgcacgaggagctgccaggctgcctaccacgggctggctctccgtccactaggctgctggttagggcacgccctactagacgaagagtttccctggcggcaccacagcccgccacggcagtgagcgcaagctgcttatgc

SEQ ID NO: 2610 - DNA, 452 bp, Chlorella vulgaris
  unsure (1)..(452): unsure at all n locations
gggtccacccacgcgtccggaccaagccccttcagcaaaagatccacgatgcagaccgcctttgtccgctccggcctccgtgccgccgtccccaccgctggcaagggcacccgccaggtgacccgcgcctctgtggagtggtacggccctgaccgcgccaagttcctgggtcccttcaccaaccccccctcttacctgaagggtgagttcgctggcgactacggctgggacacctctggcctgtccgctgatcccgagaccttctcccgctacagggaggttgaggtgatccatgcccggtgggccatgcttggcgccctgggctgcgtcgtgcccgagctgctggaccgcaacggcaccgtcaactttggcgagaacgccgtgtggttcaaggctggtgccgccatcttttggtgatgacggctcacctanctgggcaacccctccctcat

SEQ ID NO: 2611 - DNA, 205 bp, Chlorella vulgaris
cgggtccacccacgcgtccggagccgttgagggctaccgcaccaacggcggcggctgggactgggccgacggcctggacaacctgtaccccggcggcgactactttgaccccctgggcctgcccgacgaacccgaggccctgcccgacctcaaggtcaaggacatcaccacaccgcgcctggccatggcctccatgctgggcttc

SEQ ID NO: 2612 - DNA, 409 bp, Chlorella vulgaris
ttcgcgggtccacccacgcgtccggatcctgtcccttcccaggcctctccccctgtgctgtacaagccccagatcagtacagtccaactatttatgtggatttattatttatgtggtgagtctagggtcagccggggcaggcagaactgtgtttccatgggtgtgagtactgttttctgctgtgcccgcttgacttgcggggtatgtcagccgctgcgtgcatgttggtgtgtcaacgggcatattctgtctgtgtgcactgtgggactgttgcttgtacacgctgtcacggtcttctgcctggactttgtgagataacagtgctgagacttcagtgcggcagtggctccttgtcgccgttggagtgtttgtatttgtccttctgagagggcatggttatgaagcatgc

SEQ ID NO: 2613 - DNA, 76 bp, Chlorella vulgaris
aaaaggattcaaccttacgtacgcatgcatgcaaattcggggggtcttcaaaagtgtcccccaaattcagtggagg

SEQ ID NO: 2614 - DNA, 258 bp, Chlorella vulgaris
tttttgctgcttatatattgattacaagcaagtccaacgtcacatgactggcatgtttggcctccagcgtcagttcagggaaaatgctcttctcgttgaaaaaggatgcctacaccaggccctggagggcggggggacaaggttcaatcccctgccccctcaccctgcccatccgcgaccccacgaaatgtagaaccaaatacccacggctgccctttgctggtggtaacccaagatgtaacattgctggttgaaaaa

SEQ ID NO: 2615 - DNA, 435 bp, Chlorella vulgaris
  unsure (1)..(435): unsure at all n locations
ggtccgacattaccgggtccacccacgcgtccgatgcggagaagcgtctgcaagagctgcttcaagtccagctagaggtggaacgtaggtacctggaggaccagcaggcagacttccaagggtctcttttggctgctggcgtgctcacagcgcttggggtgggccagtggttcgtcttgccgttccagacagagtgtgacgcccgggtctttgccacgggctatgcactgctagtgttggtggctgcctccattgcagctgttgcctatgtcaggtgcagacgcagccttgagtacttggaaagtctcgaggcttatgagaggagcctgatagcggacaggaagctgctgtangcacgatgacccctgcaggtgtttacttttgtgtatagccacatttgcttggtcattgccttgcctgcctgacatatgaatg

SEQ ID NO: 2616 - DNA, 398 bp, Chlorella vulgaris
acgcgtccgaccacgcgtccgcccacgcgtccgcggacgcgtcaagccgggaatcgagttggccttgagccgacgcgtttgacgcccgcagcagcacctaacacacgcaccaggcaccatgctcatctccaagaagaacaggcgtgaggtgtacaagttcctcttcaaggagggtgtgctgtacgcggagaaggacttcaacctgccggagcaccccgagattgagggggtgtccaacctggaggtcatcaagctgatgcagtccatgaagagcaaggacttggtcagcgagcgctatgcctggcgccactactactggttcctgacggacgcgggcatcgagcacctgcgtgagtacctgaacttgcccagcgagattgtgcccgccacactgaaga

SEQ ID NO: 2617 - DNA, 396 bp, Chlorella vulgaris
ccgggtccacccacgcgtccgcacacgcgtccgcacagcccacgcgagtttatgttactgtgtcgatggtatgtggccgtggtggcctcgtggcaagcattgtgatgtagcgagggtaggccccactgggtttcccggggccgtctggagggcagcctttacgaaggaaggtgaaacgcatggagcacttgggttcgatgaaactggtagcaaccgtgtatgggcctcaaggcagtggggcctgggttgtgccaaatggatgctgctgggtggcttatctgtttgctgctgctgtaggtgtgaaaggccatatgatactgcgcccccttgcgcgggctggctatatatgtgggctgagggccctgtgcattatgtagcctgcccctttttattcca

SEQ ID NO: 2618 - DNA, 408 bp, Chlorella vulgaris
ggccgagccacgcgtccgcggacgcgtgggcgctggagtggctcaactcggctaacctgggcggcgagggcgacctgaagctgaccgccagctcgtccctggacccctcagacctcggcaagaagatgccgaccctgctgctggagaagactttctcgctggacgcgtaacagccctcctggcaccttacgctgccaacccagccctgggcctaccgccagcagggtgtggggtattgctggtgccacgtgcacctgttgacgtacaaggcagcagtgtcaacgagccgtagcattagccaccacccaggagctagtcccttagggactgctgagaaacactgtgtgcctgcccttggaggtattgaaatctttctcctttgaccttattcacatccgcccctgccgc

SEQ ID NO: 2619 - DNA, 479 bp, Chlorella vulgaris
  unsure (1)..(479): unsure at all n locations
taccggtctagaattcccgggccgacccacgcgtccaatcctcttctacctagggctgttcttctcgtacgagattctcacccctgccgccttgtccttctttgtgagctacgctgatggagcggtggagtccctctggtcaatcgaccagtactttgagttcgtgctggtgctcatgctcagcacagggctggctttccaggtgcccgtcatccaggtcatgctgggccagctgcgcatcgtgagttcggagcagatgttctcccagtggcgctttgtggtggtcggcgccaccattgccgcggccgtgctcaccccctccacggaccccttcacgcagacgctgctggcggtgccgctcatagggctgtacatgggaggcgctggggtggtgcggctgcttgagcagcggcggggggagagccgggcctgaanaggccgcccggctttagggaggacactgttgacagatgggacat

SEQ ID NO: 2620 - DNA, 220 bp, Chlorella vulgaris
ggtactagtctagaatgcccgggtcgacccacgagtccacaataagggcactaggggatgccctgcaagacttgcatgatgaggtacaggatatcactcaaaagttccaggataagctactgaagttccagtgaccacgctcatgcagtatatcgtaacagaggctgtgcacccagcatatcgcaggacgcagtacagcgtaacctgagtttgggctgga

SEQ ID NO: 2621 - DNA, 346 bp, Chlorella vulgaris
gggtcgacccacacgtccgcccacgcgtccgcagagacctgtcttaacgtaacttcaacaacccgtcgtgcatgctgcttcaataaccggactatagtaaatcagcgtattttctttgcttttgagcccactcccttaaacatatatagtacggcttcgcatcaggaaagtaaccaagcagggcagcatgaagctgctcacgcacaacatgctgcagtgccacattaagggcgtgaaaaacggataccccttcaagatagaggcagagaaagtggaggagcggccagcagactatgaccctgacttcctcaggcacatcttcccccgcatccattgggatgctctg

SEQ ID NO: 2622 - DNA, 377 bp, Chlorella vulgaris
cacgcgtccacggacacgtgggcggacccttggttcaaatttggtaataaaggaccaaaaaaaggtgccggctgcaaaaaaggcaaaggcgttgcaggctgccttgaaggcacccaatctgccggtggcacccggtgcaaagtatctgattaaaacggctttaacgtgggccttggacaacaaaggcagtacaggaagcgtggaacgccattcagaaaaagcacccgacctgcccgtcatgttctttgccgccggcgacgacaaggcgatggcgctggcgggggtgccccaagggctcacgcccaagctgacagcgggcgactggttgaagcaggcgctggccgtgctgggcggcaagggcgggggcaagcccacca

SEQ ID NO: 2623 - DNA, 458 bp, Chlorella vulgaris
attcccgggccgacccacgcgtccactagcatccatgcgtaagctagggagaagaattcctgggttgctgcttgttgtggtcgcggtaatctcatgtgggatcttcgatttgttgcacacatctcgccttttggggcctcggcggcggatggtggagcttgaccctgctgtgggggagctcttggcagatggagtgctggacgtgccgccgcaggaaggctgcccacacaggacggctccgtgcggctaccagctcctgctgctcggtttccacaatacgaggacatcgttttcgtctcgattgataaatctaatgggaacatacctaggccaaaaggaaacacttgatattggcaaaaacaacccgctcaagtggtggtcgcgtcgtgatgtgatggcgattcaccactacctgatgtccaagtacacagacaatgtcaccatcccaggcctgccgt

SEQ ID NO: 2624 - DNA, 367 bp, Chlorella vulgaris
ggtcgacccacgagtccaaactgaggagcaagcatggtgctcaagacccaaacttgccgctttaacgggctcaaggattaacccggcaaaggaaacctggtcaaccctttttaatggcaacaaattccccttcctaaaccaaaattgcaaaaccattttcaacaaaaggaaaaggcccgcaaaaattgcttggacaaccctctacaggaagcagcaccgcaaggacaagaaggcgaaggttgcccgcaagaagcgcaggtctgccaccaaggtgcagacgcgctcaattgtgggcgtgtccctggaggtgattcagaagaagaaggcaaagaagcccgagcagcgcaaggcctcacgcgaggcggcc

SEQ ID NO: 2625 - DNA, 326 bp, Chlorella vulgaris
cgggtcgacccacgagtccgggcaatcccataccttttgcacatcatacgacactacgagaacttgccatcagtagttattttcagccaaggggaggctcgttcagacctggccattgattctcgcgtggctgctgcactgttgccaagcctggtgcagctggccttggttcatatcctcatctatgctgggtggggcccattcgcggtggagaacaacttcatcaattttgccgtcggtctctacgccgacaaggtgcttgctgccttggtggtgcatctgtcagatcctaacgtccttgtgttcaatgccatttgtgccaccac

SEQ ID NO: 2626 - DNA, 432 bp, Chlorella vulgaris
gacccacgcatccacccacgcgtccggggcccgcctgtacagccagacacgatgacaaagaagaggaggaactcgggtcgcaacaagcacggccgtggccatgtgacccgcgtgcgctgcgaatcctctggcgtgctggtccctaaggacaaggccatcaagcgcttcattgtcaggaacatcgtggatgcctccgccatccgtgatatccaggacgcttgtgctattgatgggtatgcgctgcccaagctgtaccgcaaggtgtattactgcatcagcgcggctatccactccaagattgtgcgcgtgcgcagccgcaagaacaggcgcaacagggagccgcctgcacgccctggtttcgggccccgccgtgagggccagcagggcgggcagcaaggccagcaagggggggggcagcatggaggacagcag

SEQ ID NO: 2627 - DNA, 257 bp, Chlorella vulgaris
ccgggtcgacccacgagtccgcccacgcgtccgcccacgcgtccggcaagatggcgcggggcccaaagaaacatctgaagagattgaatgccccgaagcactggatgctcgacaagcttgggggcatctttgcccccaagccgagcgcgggcccccacaagacccgggagtgcttgccgctcatcctgctgctgaggaacaggctcaagtacgctctgacgggcaaggaggtgacgagcatcctcatgcagcgcctg

SEQ ID NO: 2628 - DNA, 253 bp, Chlorella vulgaris
ccaggtaccagtctagaattgccgggtcgacccacgagtccggacagtcatcaggcctgtgaccaacgataagaccaggggcaacccccgaagaagcacgttgacagccacatgaacagctgcaggagcagctgcagcaacaacaagtacgaacacaagtaagaaggcggccaagcaagcggccgagcctgcacgggctgctgaagggcctgctgaaggcgctcttgtagccacccttgtagaacctgttgca

SEQ ID NO: 2629 - DNA, 426 bp, Chlorella vulgaris
  unsure (1)..(426): unsure at all n locations
ggtcgacccacgcatccgcggacgcgtgggcaaccgtgctggcagcagctcccgcacgacctctcacccaccagtcctagcgaggggttcaccatgaaccaggcaatctatgtctctctgtctctcattggcctggtggccattgtgggagctggtgttggtgttggtagcggcgtggcactgatcagccagcagccgcaggcgaagactgagccaaccaagcactgagtggttagttgctgtggcatacagcagcggcagcagcagcagcagctagtgctggctagcttggggacgttgcagcttttgcaaaggtgcctggccgtgtgcctanctgacggcccggtttgggagcgcgagtgccagttctttgccaatggctggctacttctgtggcacagggtttggcacaaagtgtcaataagg

SEQ ID NO: 2630 - DNA, 444 bp, Chlorella vulgaris
  unsure (1)..(444): unsure at all n locations
attcccgggccgacccacgcgtccacacaggcatcccttcagatctcctttaaggatccataggtttccggtttattctcactgatacggtgcaccacttttctttgttctgaaggaactaggtgcctgccctttggtggtattgggagttccgaatatgaagcatgcgggccgtggtgcaaagagttaagagcgctagcgtggaggtggatggggaagtcatttcaaggatangtcccgggctgctatgcttgatangctgtggagggggggacacggagcgagacgcagagttcatttgccggaagattcttagcatgcgcatatggcccgaccaaaggcagaacccggcaatggaacctaaacttaaaccaaaaggattataaattgcccggcttgtccaatttaaccctgtatggacggctgcagaaaacaaagccggac

SEQ ID NO: 2631 - DNA, 405 bp, Chlorella vulgaris
gacccacgcatccagtgcaaaatggcgagcaaggtgtccggcgaggtgctgcgtgagggtatcgctggggtgctggagggctccaagtccaaggcccgcaagttcacggagaccgtggagctccagattggcctgaagaattatgacccgcagaaggacaagcgtttcagcggctctgtgaagctgccttactgcccccgtccccacctgaaggtgtgcgtgctgggtgacgacaagcactgcgaggagggccagaacgcgggcattgacgcgatgagcgtggatgacctcaagaagctgaacaagaacaagaatctggtcaagaagctggccaagcagtatgccgccttcctgtcctctgaaagcgtgatcaagcagatgccgcgtctgctgggccccggcctg

SEQ ID NO: 2632 - DNA, 395 bp, Chlorella vulgaris
gcctcactgcttggttacacttgcatctagacagaagtgcttcccaacacatgctgcgtgtgctaggcagccgcagccgcagccctgctcaagcgcgcacaccaccagcaccgctgccgccactcgtgccgccgctgcgggtgccctccatgctaccaccaatccttgctgccttgctggcagcacacgccgcgcgagcagcccttggaatgaaaatcacccgtccctcagagggcagtgcttgcacccagcaggcctgggcctttactcggaggtcagctctgccagcttggccttgaggttggacttgcgctcgtcgtaggtgagcttggtgagcttccacttcttggtctcggcgggccgcttgcgctcggccttcttggcctcggggttgg

SEQ ID NO: 2633 - DNA, 383 bp, Chlorella vulgaris
  unsure (1)..(383): unsure at all n locations
cccacgcgtccgccacggctccctcgcccgtgccggtaaggtgcgcggccagactcccaaggtccccaagcaggacaagaaaaagaaccccaagggcagggcgctcaagcgcatcaagtacaacaggcgttttgtgaatgttgtggttggctttggcaagaagaggggccccaactcccagtaaagcctgagcctgggtcaacagaggccgccttgccagagagatgtaaaaggagttccgctgggggcgtggcacgagacttatgcagcctggcagtcacagcggggcagtcatagccaggcaggaccagcggaggaccactgcagtgacatatcttggctgtcagcttccccgatgtaagagcttcagcgcaaaanaaaaa

SEQ ID NO: 2634 - DNA, 286 bp, Chlorella vulgaris
accacagcgtccggacctggagctgctgatgatgcacaaccgcaagtactgcgccgagatcgcgcacaacgtgtccaccctcaagcgcaaggcgattgtggagcgcgccggggagctgaatgtcaagctcaccaatgccggcagcaggctgcgtagccaggaggacgagtagccgcctgggcctcagcagcagcggcggtagcagcaacggcggcagtgccagcgtatcagccattgcgttggcacagctgctcgatagatgtaatccaaccctcgagtcaaaaag

SEQ ID NO: 2635 - DNA, 205 bp, Chlorella vulgaris
ggccgctgctttggcggctcccagcttggcccgaatctggctcaaatttgcttgtttcccttcggcagtgagaagatggcggggtgctctgaaatgtgacaagaaccagtgctccaacctggtcagagatgtggccacagcctgagggtgtgcatgcaaggcccatcgaacgtctagaagaccttgtgcatgtaaaaaaaaacat

SEQ ID NO: 2636 - DNA, 377 bp, Chlorella vulgaris
ttttgctccgacgcattacaagagtctctcttatatatatctaaaggcgtgggcaagtatcaattgccgtgggtttgagtttcaggaccatacatttagctagcgcctgaggaatcttgccagcaggaaggtaatgcatgcaccatcgtaggggcgtccaaacgcggtagcgtgccggcaagagagcaatacgcaacagcatcacagacacaaaacgaagcattagcaaacccacggccaaaactgctcacacagcaagtacagcaagggaatgagcactagcggacaatgtgcacacaaaactacggacgatgctgggacaccctatgcatgtgccgccggggcaaaacactggaagtaaaagactgagcctaaga

SEQ ID NO: 2637 - DNA, 408 bp, Chlorella vulgaris
aattcccgggtcgacccacgcatccaactgtgacttactaaagatcgcaaccatggggtggggaacccgtcagggtgtacgttaattggaaatatcctcggatacagaaggggcaagtccaacaagaccaaggacacctccctgatcaagatcagcggcgtcaactcaaaggctgagaccgaattcaaccttggcaagaagattgccttcatctacaaggccaaaaccgagaaaaagggcagcctttatcgcgtgatctggggcaaggtcacccgtgcccacggcagcaccggcactgtccgcgccaagttcaggaagaacctgcaacccagctccctgggcgccaaggttcgcgtcatgctctaccccagccgtatctagtggactgaagcggcgccgccagctggc

SEQ ID NO: 2638 - DNA, 440 bp, Chlorella vulgaris
  unsure (1)..(440): unsure at all n locations
gggtcgagccacgcgtccagtggatcctgccctgctcaaccaagccccagtctgacctggtgatcgagtacagccaggggtggggcatccaggtcatcgagggctggaactcgcgtgccaaggtcggcgccgacctgaccgtgcagaagctctgaagctccacggtgcctgtgttgggtcagggggcctgggagccccattcctaggtttgggtggggttagggggcctgacggtacagaagctagcttggtggggccgctgctcctgctcggttcgcgtttccctacctggggccgctcagtcacgtttgaggtgagacttgtcaggtttctagtccacagcccacgcgagtttatgttactgtgtcgatggtatgtggccgtggtggcctcgtggcaagcattgtgatgtaccgagggtangccccactgggtttccc

SEQ ID NO: 2639 - DNA, 187 bp, Chlorella vulgaris
cccacgcatccacccacgcgtccgatgctctgagccggtcccgccgcgttctcccatcgcagcgggctggcagggaagggcgacggcagctgcttgtttgcgtccagtctattgggttgggttgggggggggcgcaagcacccatgcttggggttgtagcccctggtttgtttgctgcccggtaaaa

SEQ ID NO: 2640 - DNA, 162 bp, Chlorella vulgaris
ccgacgcgtccgcacacgcgtccgaaaaaaaaaaaaaaaaaaaaaaaaaaaaaaaaaaaaaaaaaaggaaagggacgcaggtctgatggattaaagtttgcatacgcgtgaatgcgaaatcgttactcttctaggaggtatgctaatttcaattcacgggct

SEQ ID NO: 2641 - DNA, 428 bp, Chlorella vulgaris
tcgacccacgcgaccgggtgggccccacggcgccatctcgcagctgcgggcgctggagtcctggttcgaggtgcagcgggagtttcacttctactcgtcatcggttctcatactgtacgagggcggcgccacagccgcggaggacgccagggtgcgtgtgcgctttgtagactttgcacacacattcaagctggagccgtcgctgcagcagcgggatcacaacttcctgtccggcctgcgggccatcaccgggcagggcgtcggccatcctgcgggcacaggcggccgacagcctggcctgagcgcaccgcattgcggcaggcgcctccagggtggctgaggtggtggcgcgctgtcagcctacggaagtactggctgctcgaatgccggggctttgggttggggaacgagtatgctgccagcctgtg

SEQ ID NO: 2642 - DNA, 380 bp, Chlorella vulgaris
  unsure (1)..(380): unsure at all n locations
taccggacgtacattcgcgggtccacccacgcgtccggattgtggacaacatcttccgcttcacccaggccaactcagaggtgtctgcgctgctgggccgcatcccctcggctgtcggctatcagccgacgctggccacggatttggggcagctgcaggagcgcatcaccaccaccaagaagggctccattacctcagtgcaggccatctacgtgcctgccgatgatctgactgaccctgctcccgccaccacctttgctcacttggacgccaccactgtgctgtcccgcggcattgctgagctgggtatctaccgggcgtggatcccctggattccanctcccgcatgctcaaaccccgcatcctgggtgacgagcact

SEQ ID NO: 2643 - DNA, 370 bp, Chlorella vulgaris
aagccgggaatcgagttggccttgagccgacgcgtttgacgcccgcagcagcacctaacacacgcaccaggcaccatgctcatctccaagaagaacaggcgtgaggtgtacaagttcctcttcaaggagggtgtgctgtacgcggagaaggacttcaacctgccggagcaccccgagattgagggggtgtccaacctggaggtcatcaagctgatgcagtccatgaagagcaaggacttggtcagcgagcgctatgcctggcgccactactactggttcctgacggacgcgggcatcgagcacctgcgtgagtacctgaacttgcccagcgagattgtgcccgccacactgaagaaatcgaccaggcctc

SEQ ID NO: 2644 - DNA, 160 bp, Chlorella vulgaris
gggtccagccacgcgtccgcattcaggacatgtgttgtcgttctgaaagcgcttccatagcccacatgttccagtgcggctagggaagcgctttcaggacatgtgttgtcgttctgagtttcgcctgtagataagcttgtcgggtaaccagcatacctac

SEQ ID NO: 2645 - DNA, 407 bp, Chlorella vulgaris
  unsure (1)..(407): unsure at all n locations
ttcacgggtccacccacgcgtccgcacacgcgtccggcgggcgctgtctaatctcatcaacctgaatcagcccgacctggtgctgtttgttggggaggcgctggtggggaatgacgcagttgaccagctgagcaagttcaacagtaggctggcggaccttgcccagggccatcagaagcacatcatcgatggcatcgtactcaccaaatttgacaccattgatgagaaggttggcgctgcgctgagcatggtgtacacgtcaggcgcccccatcatgtttgtgggctgcggccagacgtacccagacctcaagcgcctcaacgtcaagagcgtggtgaagagcctgctaaagtagatgggatgataggcacccaggagtccgcgaacatccttcccganggccgggg

SEQ ID NO: 2646 - DNA, 419 bp, Chlorella vulgaris
attcacgggtcgaccgacccgtccggcagtgcatctgctgaggaccgaaacggacaaccatgcagattttctgcaaaacagacaggactcatgtccttgagcttagctccgaggccactgtggccgatgtcaaggctgccatcgaggccagccagggcatcccctgcgatgcgcagcgtgtgatgttctctggtcgccagctggaggaggaggcctccctggccgcctgcggcgtgtctgacgacagccagctgtacatcctgatgcgcctgctgggtggtgccaagaagcgcaagaagaagacctacaccaagcccaagaagcagaagcacaagcacaagaagatcaagctcagggtgctcaagttctacaaggtagacgacagcggcaaggtgcagcgcctgcgcaaggtttgcccc

SEQ ID NO: 2647 - DNA, 431 bp, Chlorella vulgaris
  unsure (1)..(431): unsure at all n locations
attcacgggtcgaccgacgcgtccgatgtgagatacctgctggtggcgggggaggacaagatgctgaagaaggatgatgcacgggggatcctgaatggcactatcttccaaaagatcgccaaggaaagggaggggcgcaaggtgctgccccaggagcaggcgggaggccggtttggaagcaaagaggagtgacggcagcacacgatgcactgcaccctgntggggggccactttgtctgctcgtgaggagcgtgtggtgagtctgcacgtcgattgaggcgtgccagaaggcccgttctgatggtaatcgcatgtccatatacggatgccccccccttgctcctttaagtcttgttttctgtantggccccggtaagcctgaggactttgtataaaagccattgttgtgaagggtaatgcactgtttttgc

SEQ ID NO: 2648 - DNA, 354 bp, Chlorella vulgaris
gggtccacccacgcgtccgcagacacgtgggtgatagcgggactaccatgtctcaccgcaagttcgagcacccccgccacgggaacctgggcttcctgcccaagaagcgctgcaagcgcagcaagggcaaggtcaagcacttccccaaggatgacgcctccaagccgccccacctgaccgccttcatgggctacaaggcgggcatgacccacatcatccgcgatgtggagaagcctgggtccaagctgcacaagaaggagacgtgcgagcctgtgactgtcatcgagacccctcccatggtggtggtgggcgtggtgggctacgtgaagaccccccagggcatgcgcaccctca

SEQ ID NO: 2649 - DNA, 431 bp, Chlorella vulgaris
ttcgcgggtccacccacgcgtccgcacacgcgtccgcccacgcgtccggtcgtgcgacatcgatctcctgcatcctccccaggagctggagaagcggaagcacaagctcaagcgccttgtagcttctcccaactcctatttcatggacgtcaagtgccaggggtgcttcaccatcacgaccgtgttcagccactcccagacggtggtggtgtgccccagctgcaacaccgtgctgtgcgtgcccaccggcggcaaggcccgcctcacagagggctgctccttccgcaggaagggcgattagtcaggggaggcgctacgctggcatgtggtctcaagaaagtgcgccgccgcggcttgaggactcttgccagcgggacagcgcggcctatcaggacaggaacaggaagggagcgaagaagatttgcaaagca

SEQ ID NO: 2650 - DNA, 458 bp, Chlorella vulgaris
tcgacccacgcgaccggcactaccgcttctaaggagactccgggccctgtgggcaacggactcaatgtagtggtagccgtggacgaaagccacgtctcactggacacactgcgctgggcggctaaccaggtcctatctccccaagacacgcttcacttggtcaccgtcctagacactgcccactccaatcaagtcaacattgcggaggcagcgccaattgcagacaactccgtaaagcagtgtgtagcggagccaggagccctggaatatactacccgcttcctggagaagctgaagagcgatgtgctcagccatgagaaggccaacgttggcagcgtgaggctgacgcccaacgtctcctgtgccaactcctccaaggacattggccgggcggtgatagactacgcccagcgggagaagtgcgatgccatcctggttgggagcaggggcctggggaa

SEQ ID NO: 2651 - DNA, 443 bp, Chlorella vulgaris
attcgcgggtccacccacgcgtccggagccttccagcgtcagctcggcgtgtcccgggggtaccagaagattggcaagaagaaggtccccggcaagggtggcgagcggtggtacaagaacattggcctgggcttcaagacccccaaggaggccattgagggcaactacattgaccacaagtgccccttcaccggcaacgtgtccatccgcggccgtatccttgccggcaaggtcaagtccaccaagatgaaccgcaccattgtgatgcgccgcgactacctgcactacatcaagaagtaccagcgatatgagaagcgccacaccaacatctccgcccacatcagcccttgcttccgctgctcggagggcgacaccgtcatcattggccagtgcaggcctctgtccaagactgtgcgcttcaatgtgctgcgcgtgatccccgc

SEQ ID NO: 2652 - DNA, 456 bp, Chlorella vulgaris
tccgaaattcacgggtcgaccgacgcgtccgcgagtttaagaaggacctgctcaagacctgggccgagagccgcatgacccccctggtcgccaagtttgggcaggcccccgcccagatgaaggccatccagaagatctttgggtcgcacctgcccaagttcatcgcggtggcggaggaggagtctgaggagctgctgtcccagctgtcccaggcggcggaggccaacgaggagctcaagtttgtgtttgccagccccaaggacgggcagcggctgatggactactttgggatcaagaagggggaccttacagccttcttcattgatgatgcgcccaaagctgccaagtacctgcgccgcaacgccaaggccagcgacgtggccgagtttgtgaaggagttccacgacggagcgctggagccgcacatcaagtccgaggagccgcctgccgacaact

SEQ ID NO: 2653 - DNA, 448 bp, Chlorella vulgaris
gggtccacccacgcgtccgcaaccgaccccaggcaaccatgatcgcactcgcggcaccccagacccgctgcttccagcgcagggccatggcccaccgggaggtgcccacggtacgggccaaggtgctctgccaggcacagcgggctcccaaggcggtccaggagaagctgacccctaaggagcaggtggccaggtccctggcagtcttggctgcgactggcaccctgttggtggcttaccccgccctggctgacttctgttcccaggccaggtccaactgcatggcatcatgcaacggtgccgtggcagggttttcgtgcaacgtatcccagcagacctacacctgcaagtgccagtagtacgccctttaagttgcacctgtggtgtgttgccccaagagggggagcaatcttgacaagagcgcgtctgtgttttgggattgcaatgt

SEQ ID NO: 2654 - DNA, 398 bp, Chlorella vulgaris
attctagggtcgaccgacgcgtccgcacacgcatccgcccacgcgtccgcttgcattgctaggtttgtcttgagcttcgcccgacaaaatgtcgagccaacttgtgtgggagcttgtgaagcacaacaacgcattccttgtgaagggcgtgaacggcaccgtgttcagccgggaggctggtaacctgtataaccgcaactcctacaagtattctggcctggccaacttcaactccactgtggatgttgctgcggctaaggatggcggggtgcaggtgtccaagtcccgtggcaagaacgccagcaagcccagcgctgcccgtgctgtgtctgtaatcaagaagaacgctcgccgcaccaactacgctgtccgcgctgaggcgcagcgcgtgcgccccg

SEQ ID NO: 2655 - DNA, 346 bp, Chlorella vulgaris
gggtccagccacgcgtccggactgacttcgttgccaccaagctgatgacccgcctgacatacaccctggatgggatgaccggggagttcaagattgacggcagcggaaacatcagcctgaaggaggaggatggcatcgactcggcccccgtgacggtgcagcttcctggcggcgagcgtgtgcctttcctgttctctgccaaggagctgcaggccaagggcagcgctgacgggtttggcggcgagttcactgtgccgtcctaccgcggcgcaaccttcctggaccctaagggccgcggcgctgccaccggctacgacactgcagtggcactgcccgctgctggcga

SEQ ID NO: 2656 - DNA, 395 bp, Chlorella vulgaris
ttcccgggtccacccacgcgtccgcacggtgcttgggatagctgcaggggtgtcaagcaggcatccgcaccatgcctttcaagaggtacgtggagattggccgtgtggccatgattaactacggccctgagtacggcaagctggtggtcatctcagacgtggtcgaccagaacagggccctgattgaccggcccgacgagacccgccgtgtggagaacttcaagcgccttgcaatcactgacttcaaggtggagattccccgcctggccaagaagtccgtgctgaagaaggccctggaggaggctgatgtgttcaacaagtttgctgctagcgcctggggccagaagctggccaagcgtgccgccaaggccgaccagactgactttgaccgctac

SEQ ID NO: 2657 - DNA, 422 bp, Chlorella vulgaris
tacggatcgaaattcgcgggtccacccacgcgtccgtttagttaggtgcagcaaccatggggcgccgcccagcaaggtgctaccggcaaatcaaggggaagccgtaccccaagtctcgcttctgccgtggtgtgcctgactccaaaatccgcatctacgacgtgggcgcaaagaagtctggcgtcgatgccttcccttactgcgtccacatggtcagctgggagaaggagcacatctcctctgaggctcttgaggcggcccgcattgctgccaacaagtacatggtgaagaatgcgggcaaggacgcgttccacctccgcgtgcgcgtgcaccccttccacgtgctgcgcatcaacaagatgctttcgtgcgccggggctgataggctccagaccggcatgcgcggcgccttcggcaagccc

SEQ ID NO: 2658 - DNA, 314 bp, Chlorella vulgaris
ttcccgggtccacccacgcgtccggagtaatgcaacgaagcgcaaaaaaaaaaaaaaaaaaaaaaaaaaaaaaaaaaaaaaaaaaaaaaaaaaaaaaaaaaaaaaaaaaaaaaaaaaaaaaaaaaaaaaaaaaaaaaaaaaaaaaggggggccccccaaaaggatcaaacctaacttacgcgtgcatgcaacttcaaaccccttcaaaagtgtcaccaaaattcaattcacgggccgtcattttaaaacttcgtaacgggaaaaaccctggggtaacccaacttaatccccttgaaaaaaatccccctttccca

SEQ ID NO: 2659 - DNA, 332 bp, Chlorella vulgaris
gggtcgacccacgcgaccgcacacaggccggcatcaagccgcccagctttgtggcgtaatagatgcagcctcgcttgccactcccagtggacggaggctcccgccagcccacactatcttgcagcaccaggttgccggtgacggtcctgaacctttggcgatgtgcctctgcgggtgactgcggtaggtccattgttcgcatatgacggtgtgcatgtgtggtgcaagcctacacacgtggaggcaaatgctatcctgggggtcatgctcacgtacactctacgcattcccgtggttgacggctacctcgtgtactgtggaacctgtggtga

SEQ ID NO: 2660 - DNA, 380 bp, Chlorella vulgaris
ttttgtgtgcacctcattaaacataaaatactgaatctgtactgctattgtgatgtccagcctgtaagatggtccccaagttacgtctgttgccctagggtataattgacagtgcaagccactgtgtgcgcccagcttgttactggtgctggacaaggaccttcaaggttcaaggttcaaggacctaagttagctgatgtagacctgcctagacagagctgacagaagcaaaacagagctgctcttcttacacctagagtctaatcggtgagggctccaaaggtactggatgagatacctcaggggtcacccaaaccttatttagtcaaagtccaccaccagcaagccggcagctctggccccgcacgctaaagggagcc

SEQ ID NO: 2661 - DNA, 430 bp, Chlorella vulgaris
ggtcgaccgacgcgtccgcggacgcatgggcggacgcgtgggcggacgcgtgggagctgcagcgaaaccagccgcttcccgccgacctgctaccgtacatgcggcttgtgcacgctggcagcgaagaggagctggaagcggtgcagtttggggagcaagcggcgcccgtgagcacggctgtggaggcggcactgctgggccagttggtggcccgcctgcggcagaggctcaccatgtacaggaccacgatagagcaggacgaggcgaccatagcggacccccacaccggcgcgcgtgccaccgtggcggcccggctggtgcgcatcgagaagatcatcctgcagcaggccctggaccagctgctgcggctgcctggagcggaggaggcatccaggcatggcccccccgtgtctgaagtaaaggtggactg

SEQ ID NO: 2662 - DNA, 365 bp, Chlorella vulgaris
cgggtcgagccacgcgtccgaacggccctccctgcagcgttggattaaggctgtgcaaggatggggtcgctcgttgccaacgagaactttacgcatatcctgcgtgtgctcaacaccaacgttgatggcaagcagaagattatgtacgccctgaccgccatcaggggtattggccgccgcttttccaacatctgctgcaagaaggctgaggttgacctgaacaagagggccggtgagctgagccccgaggagctggagagcatcatgaccattgtggccaacccccgcgcctacaaggtgcccgactggttcctcaacaggcagaaggacatccgcgatggccgcttcagccagacgacctcatc

SEQ ID NO: 2663 - DNA, 334 bp, Chlorella vulgaris
gggtcgagccacgcgtccgcccacacgtccgcggaggagcaccttacaatggctccttcagggaagaaggatactaaggccgccaaggcggcaaaggccgtcaagaagtcccaatggaagaagactcgcaagccccgctacagcgtggtcttccacaggcccaggacactcatccgctccagggaccccaagtaccctaggcagagcgctccctccctgcccaagatggacgccttcagcgtgatcaaggcccccttgaccaccgagtcggccatgaagaagattgaggacaacaacaccctggtgttcctggtggacgtgcgcgccaacaaga

SEQ ID NO: 2664 - DNA, 409 bp, Chlorella vulgaris
cacggaggcctctctgggacgggttgagctgtggcaagcatgttcacggctcgcaaaaagattgtgaaggagcggggtgtggagcccgatgagctcgaggagcaggtcgctcaggcgctctttgacctggaggccaccaatgccgagctgaagggcgacctgcgcgacctgtacattgccgctgcgcgcgaggtggacgtctccgcctctcgcaaggccatcctcatccacgtgccctaccgcctgctcaagaacttccacaagatccagcagcgcctggtgcgcgagctggagaagaagttctccggcaaggacgttgtgattgtgggcgtgcgccgcatcctgccaccccccaagcacagccgccgggtgcagcgcccgcgcagcaggacgctgaccgccgtgcacg

SEQ ID NO: 2665 - DNA, 73 bp, Chlorella vulgaris
ccaaaaggatcaaagcttacttacgcttgaatgcaacttcaaaccccttcaaaagtgtcaccaaaattcaatt

SEQ ID NO: 2666 - DNA, 381 bp, Chlorella vulgaris
gggtccacccacgcgtccggagaggtctcgtcgcggctcctgcaaacatgggtaaggtccacggctccctcgcccgtgccggtaaggtgcgcggccagactcccaaggtccccaagcaggacaagaaaaagaaccccaagggcagggcgctcaagcgcatcaagtacaacaggcgttttgtgaatgttgtggttggctttggcaagaagaggggccccaactcccagtaaagcctgagcctgggtcaacagaggccgccttgccagagagatgtaaaaggagttccgctgggggcgtggcacgagacttatgcagcctgtcagtcacagcggggcagtcatagccaggcaggaccagcggaggaacactgcagtgacatat

SEQ ID NO: 2667 - DNA, 266 bp, Chlorella vulgaris
cgtccgcagacgcgtcagatcgagatcactcgaatgccgtgaaggatgaagtacacgatttcagtcataacttccagggtcagctactgacgttccagtgacctcgctcatgcagtagagcgtatcataagctgtgcacccataataacgttggacgtactatagcgtagcctgaatttgggctggattacggcttagcattacaaaatggttgcaggtactatgaaaaggggtatgtaactgacaagtggctaaactaaatgccg

SEQ ID NO: 2668 - DNA, 407 bp, Chlorella vulgaris
cccacgcgaccgactgctgtgacttactaaagatcgcagccatgggtggggagcgcgtcaggttgtacgtgagtggcaatatcctcggatacaagaggggcaagtccaaccagaccaaccacacctccctgatcaagatcagcggcgtcaactcaaaggctgagaccgaattctaccttggcaagaagattgccttcatctacaaggccaagaccgagaagaagggcagcctttatcgcgtgatctggggcaaggtcacccgtgcccacggcagcaccggcactgtccgcgccaagttcaggaagaacctgccacccagctccctgggcgccaaggttcgcgtcatgctctaccccagccgtatctagtggactgaaacggcgccgccagctggcgggcaacatgca

SEQ ID NO: 2669 - DNA, 325 bp, Chlorella vulgaris
  unsure (1)..(325): unsure at all n locations
cccacgcgtccgggtaaatattctgctccatatgtattgtagttctagccggtcagtcagtacatgcctctatgaaggtcaggggtgatgcatgttttgtgtcctttacagggtcgaatacctcttgcaacatgcttttacaacaccagttgtgggaggtagtctgtcatgtctatatattctggatattctcattcgaatattctcaagtcgctgaacgcctacaaagctgacaaatggaggctgtaagggggaggtacacacnacacatntcncccccaacttcacgaaaaacctaccaccaactcccttgcgcccaaagtac

SEQ ID NO: 2670 - DNA, 413 bp, Chlorella vulgaris
  unsure (1)..(413): unsure at all n locations
cccgggtccacccacgcgtccgaggacgcgtgggcgactacaacaagttctatgaggccttcgccaagaacctcaagctgggtgtgcacgaggacagccagaaccgcgccaagctggccgacctgctgcgctaccactccaccaagagcggcgacgagatgaccagcctcaaggactacgtcacacgcatgaaggaggagcagaaggctgtctactacatcacaggcgagtcccgcaaggccgtggagaactctcccttcctggagaagctgaagaagcgcggctacgaggtgctgttcatggtggaccccatcgacgagtatgtggtgcagcagctcaaggagtatgatggcaagaagctggtgagcgtgaccaaggaggggcttgagctggangagtctgaggacgagaag

SEQ ID NO: 2671 - DNA, 185 bp, Chlorella vulgaris
cgggtccacccacgcgtccgcaggacgcgtgggaaaaaaaaaaaaaaaagataaaatgaaacaaaaaaaaaagggggggcgcgccagacgattcaaacgttactaaccttggaaggcaaggcaaaacccctccaaagggtcacctaaattccattcaatgggcgtccttgttaaacgttctgaac

SEQ ID NO: 2672 - DNA, 306 bp, Chlorella vulgaris
taccggacgtaaattcgcgggtccacccacgcgtccgatccgtctctggagccttccccggctgaaaaaggaaacttcaacatgggggttgcaacaagaaaaaccaaaaattcccataaaagcatcaattctcttctggccctggtgataaattccggcaaatataccctgggctacaaaacaactctgaagactctgcgcaacggcaaggccaagctggtgattatcagcaacaactgcccggctgtgcgcaagtctgagatcgagtactacgccatgctctcaaagactggcgtgcaccactac

SEQ ID NO: 2673 - DNA, 329 bp, Chlorella vulgaris
gtctgcctgtttgtggggttcccccttaaagtttgcattcaggcaccaaccaaaaatgtccaagtctgagcttgcctgcgtatacgccgccctgatcctggcggatgagggtgccgatgtcagcgccgacaacatcaccgcaatcgtgaaggctgcgggtgtggatgttgagccctactggcccggcctgtttgccaagctggccgaaaagaagcgcatcgaggacttcatcgtgaacgttggcgccggtggcggcgctgcccctgctgcgggcggtgctgcacctgctgccggcggtgccgctgatgccgcccccgccgccaaggagg

SEQ ID NO: 2674 - DNA, 363 bp, Chlorella vulgaris
  unsure (1)..(363): unsure at all n locations
gtaaggtcttgaattcccgggtccacccacgcgtccgaccacgcgtccgggctgggtgtcacacgacctgaggtagtgggcagccctagcctgcccttccttgcccatatgtctttagccccccgagagtgcatgtgagcacagcgtgcaggacttgtatgcccccagtgtgaaaggagattgcgtgtgcaatgtgggagtacgtttgattgancgctggtgtgtccaaatgcttggttggcagccggctgcagttggctgctactgtgctcgtgcttatgttttgctttgctattttcgttttcttgcacgcgacctagccaggatttgtcacagggtgactggagttacacaagggccgac

SEQ ID NO: 2675 - DNA, 256 bp, Chlorella vulgaris
  unsure (1)..(256): unsure at all n locations
gggtccacccacgcgtccgagcatgtaggacgtgaaggccttgcatgccttgagttttgggcgccctgctagctgcacttggcctccctgcaattcttcttcccgtattcttgtaccaccttgttacccctgcaaaccaattccaacatgctgctgttgccagagaagaaaatctcaccattcttgtccgatggctaacttctgattactgttgttcaacataataaanacaaaaaaaaaataattaatgttaata

SEQ ID NO: 2676 - DNA, 429 bp, Chlorella vulgaris
cgggtccacccacgcgtccgcacaagcgtccggtccaagcacctctttagcagcctgacacgctcagcgcagccggtcggccccatggagttcatactgtgcctgcggcggaagtacccgcagtttgcacagaccagcagagaaggcttctacatgcagcaggatgctgaggagtgctggacgagcctgatgtacacgctgcgggagaaactcaaggactctgacagcccggatgagtcagccatcacgaagctcttcggtctggacctccacacgcggctcaagtgcgaggactccgaagagactatcgagcagcgcgtacatgctcaagtgcagcatctcctctgaggtcaaccatctgggggaaagggatcaagctggggctgcaggacgaccgagagaagaactcggagcagctgggcaagatgg

SEQ ID NO: 2677 - DNA, 337 bp, Chlorella vulgaris
cggtccgacctatccgggtccacccacgcgtccgagaaggcagtgcatctgctgaggaccgaaacggacaaccatgcagattttctgcaaaacagacaggactcatgtccttgagcttaactcccaagccaatgttgccgatgtcaaggctgccatcgaggccaaccaaggcatcccctgcgatgcccaacctgttatgttctccggtcgccagctggaagaggaggcctccctggccgcctgccgcgtgtctgacgacagccagctgtacatcctgatgcgcctgctgggtggtgccaagaagcgcaagaagaagacctacaccaagcccaagaag

SEQ ID NO: 2678 - DNA, 78 bp, Chlorella vulgaris
ccacgcgtccgcacacgcgtctgcccacgcgtctgcggacgcgtggggaaagctgtaaccactggaagacacactgtg

SEQ ID NO: 2679 - DNA, 87 bp, Chlorella vulgaris
aagacgcgtgggaaaaaaaaaaaaacaaaagataaaaaaaaagaaacacataaaacaaatcaaaaacagaaaacacaaatgcaaaaa

SEQ ID NO: 2680 - DNA, 360 bp, Chlorella vulgaris
cccgggtccacccacgcgtccgaacacgcgtccgcccacgcgtccgagcgcatgttggcggtgcagaaaatcatctggctcacaaaggggctgtttggggacgacgacaccaacggccatgtggacaactttgcctgctttgcacggccaggggtcgtgctgctggcatggacagatgacgagaaggatgaacagtacccaatctcctgtgaggcgctgcgagtgctggagggctccacagatgccaagggccgcaagctgcaggttgtcaaggtgcccctgccggagccgctgttcgagtccgaggaggagtctgtgggagtgaccagagtgtctggctcaaaaccgcggctggtgggg

SEQ ID NO: 2681 - DNA, 383 bp, Chlorella vulgaris
gacgggctcaactacctgggcaacccctccctcatccacgcacagtccatcgtggccgtgctgctctcccagattgtgctgatgggcctggttgagggctaccgcgtgaacggcggccccgctggcgagggccttgacgccctgtaccccggcgaggcctttgaccccctgggcctggccgacgaccccgacagcttcgcggagctcaaggttaaggagatcaagaacggccgcctggccatggtgtccatgcttggctttggcgtgcagggcctgctcaccggcaagggccccctggagaacctggctgaccacctggctgaccccaccgtgaacaacggctttgccgtggccaccaagttcacccccggcaactgagctct

SEQ ID NO: 2682 - DNA, 55 bp, Chlorella vulgaris
aaaaaaaaaaaaaaaaaaaaaaaaaaaaaaaaaaaaaaaaaaaaaaaaaaaaaaa

SEQ ID NO: 2683 - DNA, 221 bp, Chlorella vulgaris
ttcccgggtccacccacgcgtccgagcaggagtacctgaagagccgctgagcgcatgctgtgctgggcatgctgtgcacccgcccagggcacgcgctgtgagcgctgtgctgggcagtgcactggcatccccggcgtgtagatggcgccggctggctggctggcggtggtgcatgctccctgtgggacggcacggccgatgaccgtgtaacacacgtggag

SEQ ID NO: 2684 - DNA, 344 bp, Chlorella vulgaris
gggtccacccacgcgtccgcaggtttctacccaggcccactcccccaggcagaaacaagatggtggctctccagattctcgcagcgactgccaagggcaccgtcaagggtaccgttaagggtaccgcaaagcaggcagcgaagaccgtgaagaaagcggccatcaagaccgcaaagaaggtcgcccccaagaagggtggcgtggagtggtacggccccaacaggcccctgttcctgggcccctacagccccgagcccccgagccacctgaagggtgagttcgctggcgactacggctgggacacctccggcctgtccgccgatcccgagaccttctcccgctac

SEQ ID NO: 2685 - DNA, 451 bp, Chlorella vulgaris
  unsure (1)..(451): unsure at all n locations
gtacggtcgacnatccgggtcgaccacgcgtccgaagcgggcaagatggtgcagcgtgacaagtcgggagcccctgtgatgaagaacggggtgccggtggagctgacgtcccacactctcaaccctgtaccttgtgccatcggaaggtccgggctgccagacaatgtcaagttcagggaagacctgaaactggcggggctggcaaacgtcaccgcaactctgctcaacttgctgggactggaggcgccagacttctaccagccctccctagtcaccacgtactgaaccactgtggcaaggggtcgtgggcaaggcatgtacactatgtagcactgcaagactgattttgttgacggttttgtggcaagccatgcaaactangggaagtaaggattcaacattctgacaggcttgactacttagtcaccattgtgggatttggacatgcaaa

SEQ ID NO: 2686 - DNA, 300 bp, Chlorella vulgaris
  unsure (1)..(300): unsure at all n locations
cgggtcggcccacgcgtccgcagaaacgtgggctaccgcgagccggaggagggcaaggagganggagccgccgaggagggcaccgccgtggagtacgcgcccgataacggcttccaggcagcgctgccaggtgctgaggaaggctatgatgcgtacggctaaaatgccgccggcgaggctgccactggcttcgccaccggcttcgagcccggaaacggctttgatgccgcgcccgcccccgggggctttgaggcggctgctgcccccgctgcgcccgtggagtacgctgcccagcccgcg

SEQ ID NO: 2687 - DNA, 281 bp, Chlorella vulgaris
cccacgcgtccgaagcgggcaagatggtgcatcgtgacaagtcgggagcccctgtgatgaagaacggggtgccggtggacctgacgtcccacactctcaaccctgtaccttgtgccatcggagggtgggggctgccagacaatgtcaagttcagggaagacctgacactggcggcgctggcaaacgtcatcgcaactctgctcaacttgctcggactggaggcgccagacttctagcagccctccctactcaccacgtactgaaccactgtcgcaacgggt

SEQ ID NO: 2688 - DNA, 255 bp, Chlorella vulgaris
ccgggtccacccacgcgtccgcggacgcgtgggctgcagcttgcagttgccggctgcctgaatggggcccagccggggagcactggcggcgggcaggcacatgaattgcacaaagcgctggcgggcggcagctgccgccgacctctcctcgtgcttgctgtgcgcttgaatgctatgggcatggcgctgtaagacttgactagcaaaaaaaaaagaaaatttaaaacaaaaaataaataaaaaaaaaaacaaaca

SEQ ID NO: 2689 - DNA, 294 bp, Chlorella vulgaris
  unsure (1)..(294): unsure at all n locations
ccacgcgtccgaaaaaaaaanaaaaaaaaaaaaaaaatcaaagcaatacaaaaaataacaacaaaatataccaaaaaaaaaaaaaataaaaaggggggacccctccaaaaggttttaaatcaaaaaaaagggggggcccccccaaaagattcaaccttaagtacccctaaattcaaattcaaaacccttcaatttggtcccccaaattcaattaaaaggcggtttttttaaaacttactgacttgaaaaaacctgcccttacccaatttaacccccttgcaaaaaaaccccctt

SEQ ID NO: 2690 - DNA, 318 bp, Chlorella vulgaris
ttcgggggtccacccacgcgtccgaccacgcgtccgcccacgcgtccgacgatggcctccaccatgacctgcaccgccctgcgcgcctcggttgccaggagggctgccccggcccgccgcggtgccgttaaaggccaggcccccggcaaacaaattccccaacggctggccggcaccccccggcagggacaaccgggatgccgctgacctggcaaggaaacttctccctttgacccctcaaactgggcaacaaacccaatgggcccacctggtttcaacaaggggggcttgaaaaccggccccgggccaagccgggtg

SEQ ID NO: 2691 - DNA, 302 bp, Chlorella vulgaris
ccggggccacccacgcgtccggatcatgaagaacctgccacccagctccctgggcgccaaggttcgcgtcatgctctaccccagccgtatctagtggactgaagcggcgccgccagctggcgggcagcatgcacgggagcagtggcgatgcgcggcagctgtgccggggcaaactggagtgagggacgggccccgcgcactggcaggggcaggtgcttcggtgggctgtagcaagctcagcacagcacagcatggcgcagcagccgtgctatgtgtggtgactgtgcatggacccggggaca

SEQ ID NO: 2692 - DNA, 309 bp, Chlorella vulgaris
ccctatagtgaatcgtattagtattagttagtcccgtttgggttaaagttgctttcaccgtccgccaaaacacaaaatgaagctggtcgctgcttacctgctggctactctgggtggcaaggatgctcccaccgccgaggacatcaagtccatcctgtccagcgttggtgctgaggccgatgaggagcgcctgagcaagctgctttctgagctggagggcaagaacatcaacgacgtggttgcctccggcctgtccaagcctggctctgtgcctgctggcggagttgcctcttcgggcggtgctgcccc

SEQ ID NO: 2693 - DNA, 60 bp, Chlorella vulgaris
aacaccctatagtgagtcgtattaaggcatgcggtgtgtagggtaacgccttcgtcgctt

SEQ ID NO: 2694 - DNA, 375 bp, Chlorella vulgaris
ccctatagtgagtcgtattaacgcgtgggctgacgcgtgggcagcaccagcatcagccatcccctcgatagctgctccacgcgccaatggcgctgcagctctggctgacacgatgccagcctctccgccgcctgagctgcagcagacggtggccttcacactggatgactcagaaagccctgccaagcactgacggcaagaggagtttgctggcatggggtttgtgccagtggtctcctcggggtgcacagaccatgcagcattgggcggctttggcagggcttgggggctttgagtacgggcacatggcttgcaacgaggtatctgtacactgatttcatttggcatagcacctcatcctgtactctacctcac

SEQ ID NO: 2695 - DNA, 340 bp, Chlorella vulgaris
gagtcgtattaagcgtccggtgcgctgcgagagttccgccgccatggtccccaaggacaaggcagtgacgcgctttgtggtgcgcaacatcttggatgcctctgcactgcgcgacatccacgatgcacaggtgtacaacgagtacatgctgcccaagatatacaggaaggtgtactacagtatctccgccgccatccactcccgcatcgtgcgcgtgcgctcccgcaagaaccgccgcaaccgctagccgcccaagttcgtgccgcggggacgcgtccgcgccgcacgtgacggctaccagaggcctggtcgcccccagcagcagtgacttgagtgccac

SEQ ID NO: 2696 - DNA, 334 bp, Chlorella vulgaris
aactccctatagtgagtcgtattaactgggacttgcctctgcatatactcgtcttcgtcacaagtaaaccatgcagaccgccatgtcgcagagggcttttgtcgccgcacagcccgtgcgcgctgcgcccaaggccacccgcgcagccaggtgcgctgtggcgctgcgcgcctccgctgatgagtcgcgccgcgcactgctgggcggcctgctggccggtgctgtggccctgaccgcgggcgctcccaacgccgccaacgacattatcgatgaccgcaaggcatcgacaagggcttcaactggacctacgacgcatcccacacctacctgcccc

SEQ ID NO: 2697 - DNA, 229 bp, Chlorella vulgaris
  unsure (1)..(229): unsure at all n locations
ctccctatagtgagtcgtattaagcgttctgcntgtctgtgcgctaggtaccgcttgctctggctataagccttgcattactcatggtatcgcaattctcaatgctgggctgggctactggggttgactactctcttgggtagggcacgctctctgctgggcctgttacacatttttgggtgctgatctatgcttgcctgtatttcgttttgcatctccaccgctgcct

SEQ ID NO: 2698 - DNA, 279 bp, Chlorella vulgaris
ccctaaagtgaatcgtattactgcaattccctcagccagctgcttgcgtcgtcctacccactcgtcctgcacggcaacgcttggcgttttcccttgctccggctatcccccactgtaaaactgcctaccaccgttgttatcagcatcgctgccagtgttgtacacagccgatgccctaaccatcggcttctaacagtatacgcaggcccgacgacgagcttcatcttctcaccgtcctaaactcggttatccgcacccatttcaccacttctgcccaca

SEQ ID NO: 2699 - DNA, 116 bp, Chlorella vulgaris
accctatagtgaatcgtattaagagctccaagacctatcctggcaagggactcgggttcaaccgtgtagatggcggccacttccactgtctctaccaggattggaacagcatcttc

SEQ ID NO: 2700 - DNA, 345 bp, Chlorella vulgaris
caataccctatagtgagtcgtattaaatcacacatccattctccacctttgcgacacgtgtggacgacgcatgcaccgtggacgtgctgcactgaaagtgttgacactctcatggtgaacgtcgcagtaattagagatggaccacaggaacacaacactgatatcctggtcgttgtgaggccaacgcttaccatgtttgttggtcaggtttcaatgttctctcagtctacctgtacgtgcaagcactttcaagtttgatcagggaagctgcctgctgtaagtcccgaaattttgttttgttgcctgcctatctgttgtgcctgttgggaagtcatgcctgtccta

SEQ ID NO: 2701 - DNA, 356 bp, Chlorella vulgaris
cccacgcgtccggatagtctcttcccgcaccatcgacatcccttcgggggtggagattgaagtcaaggcgcgtaaggtccgcgtcaagggccctcgtggcaccctgacccgcgacttcaagcacctggcggtggacatgttcctgtccgaggaggagggcgtgaagaagcttaacgtggactgccactttggcaagcgcaaaagcctggcagctatccgcacagccacctcccacgtgcagaacctgatcactggcgtgaccaagggctaccagtacaagatgcgcctggtgtatgcccatttccccatcaacatcaacatcgaggatggaagcaacgtcatcgagatccgcacct

SEQ ID NO: 2702 - DNA, 336 bp, Chlorella vulgaris
ccctatagtgagtcgtattacacctatggacgctctcatagcgcagctgcagtcatcgctgcaggcgcaggatttctcccagctagcccccatctgcgatgctgcacagttataggagccgtctggcagttttccgcctcaatggactttcgcccttcatctcttagctcacctcaactcttcaatcctagaagacgccaggttcgtacacaaacgcattcctgaggaagtgacgcaggtaactgttgcgcatgcagttacctgttgcgacagcccttccaatgcaccactggaagctccttgaggccagcttattacaatccccacgctggccct

SEQ ID NO: 2703 - DNA, 162 bp, Chlorella vulgaris
ctccctatagtgagtcgtattaaaccgcacgctgaggcagaacaagggggatcgctctccagatgctaacagcaacggcaacggagacgcttatagtgacgttttcgggtaccacacgcacgaggttgagaacgatctggggcgcaggcaacgcgacctgat

SEQ ID NO: 2704 - DNA, 391 bp, Chlorella vulgaris
gagtcgtattacaacctgaagaagaacaagttccactgccccatcgtcaaccttgacaagctgtggagccttgtgggcgaggaggctcgtgttgaggcctccaaggactcgagcagcgctgccgtgattgatgtcaccaagtatggcatcttcaaggtgctgggcaagggcgagctcccgcagcagccagtggtggtgaaggccaagtttgtgagcaagctggcggagcagaaaatcaaggcggtgggtggcgcggtacagctggtggcctaagagaccaggacagcaaagaagcagctccttgcacacagccagcccttccgctagggagtggagtgtgcaagggcgggttttggcacagcggcaggcgcggcggcggcaacagcggaac

SEQ ID NO: 2705 - DNA, 374 bp, Chlorella vulgaris
gcaacaccctatagtgagtcgtattaaggcgtgggtacgtcgacgggttggtgcacagctttctgtgcctatagccccacaaaagcggccatttgcatcatgggcaacggggggttcgtactacattgccggggtcctccgtaggtctggccactgtgcagaccaccgcctgcagcattgctgaatgtttcgccaagaaatgcttttcactggggtgagggctgtgtcagttggttcaagagatgaattcgacttcagatctaatggatacattgatcgttgcttcaagaagtgtctaggcctaactcaagggttggctgcatttcattcagcctgagcactacatccacttctgtgcatgcatcggtcacatg

SEQ ID NO: 2706 - DNA, 380 bp, Chlorella vulgaris
aattccctatagtgagtcgtattaagccttgggcggacgcgtggggtttcctggggcttttcaccgtctgtagcattgcataatgacgggccacggaacaggcaaatttgtgtgacatgtagctgacgccgggttgcaccctagcttatatgtggttcttcagcatctagagtcatggataggatgcggagccccatcttacctggtgttgctgccagcgcctggacgtttgttgtgatgggtggtgccacattcgcagtcagtgctgtgagcttgactgtggccagacgagtcatccgttacacgaagttgaaggtggccgcatagtgtccttcatgccaagggctgggcttccaagcctgtgacatatgccacggcac

SEQ ID NO: 2707 - DNA, 425 bp, Chlorella vulgaris
tatagtgaatcgtattaaactatagtcaggagtgcagtcaatcttcagcttcacatgattagactgcttgtgacagtcggaccagaagggcattgagctcaggtcctcaggtcagcaccagtctgaatgaagagtcctctccttggtcttttgtattcgagtctagtctaacagcgcacctgactagagtgtcccttccaacacctgcatgttttgaaggggtcacccggtggtattcatgtaacgcgcagtttgaaatgtaatgctgggtactttagcttgaggtgtggatttcctcaaggggttcctcaagtgttccaagtcgggggcagtttggtaatggtggcttacattgcttatggcattggttagctttgcagcccagcaggaaaggggataccccattgtcaattttcaggctgctg

SEQ ID NO: 2708 - DNA, 249 bp, Chlorella vulgaris
aactccctatagtgagtcgtactaaaagtacagttgtactgtgtcgaccggtccacattcatgcgcgcattatccgaaggtgctgtgtccttcatatatggacgggcatttcatttggcgttggggctggtcacgccaccggcctgtcagccgacggggagagcttcattcggtggggccacattgaggtcatccatgcgctctgggcaatgtttggatccatgggctgcatcttggccgaggtcctgc

SEQ ID NO: 2709 - DNA, 386 bp, Chlorella vulgaris
cctatagtgaatcgtactagggcgaacgcgtgggctactctcagaggccagatcacgccgcaacgggccaaactgcatgcccggctggggcagcgtcaccaggcagcccactaccacaagctgaacctggatcgcattgatgccgagggaatcaccggccagaatgccgtggaggccctcagcttccttgcacagtatcaacagtccaagggtgagctggagctggcggagcagtacttcacccgccctgctggactttgggggcggcagcaaggacaaggccccgggcagcctgcgggagatacgcagcctcagaacgcggggcggcggcggggggctgctgacaacgcccgggggctgtggccctgccaagctcgactcaccgg

SEQ ID NO: 2710 - DNA, 267 bp, Chlorella vulgaris
cctatagtgagtcgtattaaggttaagggacgatgtcagcttgcatgtaggacttgttgttgatgaggacatcatgagcttaactagtcggcactacatgtacgggaggctctaaagctcgtcattacatatgctgaacaggtccttatggtcatttttggtgcctgcattccgtcaacggattatagaatatgcctgtacatgtgtgactgtgtacatcgtcgtggcatcgactttcatgtttcagatgcacgcataccgggagga

SEQ ID NO: 2711 - DNA, 433 bp, Chlorella vulgaris
gagtcgtattatgatggcaagcagaagattatgtacgccctgaccgccatcaggggtattggccgccgcttttccaacatctgctgcaagaaggctgaggttgacctgaacaagagggccggtgagctgagccccgaggagctggagagcatcatgaccattgtggccaacccccgcgcctacaaggtgcccgactggttcctcaacaggcagaaggacatccgcgatggccgcttcagccagacgacctcatctgccctggacaccaagttgcgtgacgacctggagcgccttaagaagatcaggaaccaccgcggcctgcgccactattggggcctgactgtgcgcggccagcacaccaagaccaccggtcgccgcggcaagaacgtgggtgttgccaagaagcgctaagcaagctgggcagcagggagcc

SEQ ID NO: 2712 - DNA, 424 bp, Chlorella vulgaris
  unsure (1)..(424): unsure at all n locations
ctctatactgagtcgtattaangcagtgcatctgctgaggaccgaaacggccacccatgcagattttctgcaaaacagacaggactcatgtccttgagcttagctccgaggccactgtggccgatgtcaaggctgccatcgaggccacccagggcatcccctgcgatgcgcaacgtgtgatgttctctggtcgccagctggaggatgaggcctccctgaccgcctgcggcgtgtctgacgacagccagctgtacatcctgatgcgcctgctgggtggtgccacgaagcgcacgaagaagacctacaccaagcccaagaagcagaagcacattcacaagaagatcaagctcagggtgctcaagttctacaaggtagacgacagcggcaaggtgcagcgcctgcgcaaggtttgcccccagtgcgg

SEQ ID NO: 2713 - DNA, 395 bp, Chlorella vulgaris
ccctatagtgaatcgtattagggcggacgcgtgggctactctcagaaaccagatcacgccgccatgcagaccactgcttgcgtctcctctctccgtgcccctgccagcggcttcaagtcgtgcagggcccagcgcccagcgcgttgccttgtagttcgcgcagaggccgggaagaacctcagggagacccttctcggagcagcagctattggcgttgcatccttgctggttgcggcagggccctctcatgctggtctggacaccagcacaaccaagaagggcgaggctgcaaagatcgagtactcccgcattgaggacgagtcccccgaggctgtggtgaagaagcttaagtacgaggtgctgcccgacgtgttcaagaagctgggcgcagacgc

SEQ ID NO: 2714 - DNA, 71 bp, Chlorella vulgaris
  unsure (1)..(71): unsure at all n locations
gtgagtcgtattaaacaatacgactcactanagggagtcgtactaaccggtagcacgcaatagagggtccc

SEQ ID NO: 2715 - DNA, 397 bp, Chlorella vulgaris
accctatagtgagtcgtattaagggcggctacgggcgctactgagttgtgcccaaacgcccacccccacacatgatgggcctgggccaaggaacactaccgactgcagcggcctccgactgacaagctttactcttgatgataccaacgaatgcatgctggggcgctggtgctgctcgtagcaaggcaaaggcgctgttgaatgaatgtctcgcttgctcgctctcttgctcggaggcattgctagtgagggaccagggtgggtgagggggcggcccgttcccttgcgcaccctgcgacgctgtttatgcttttcatggctgtacagaggcacttggcagttcctacggcacgcattgattggtgttcaaattggctgggatccggtacgaaggtgc

SEQ ID NO: 2716 - DNA, 399 bp, Chlorella vulgaris
gttttgtcttacaacaccctatagtgagtcgtattaaaaacctatctgaaacgctagactgagccgttgggtgcggcccacaacatcgctgccacattacagtggcatgtgagtctgacaggaaaaattcctgctattcaaaaggtttcaaagcctctgggacatgtaaggcgcagggacaggcaagggagcgccagcatcaggagaagcagcactagcaagcggcggcaaaggcagcagtgaggcggcgacagcatcggcagcagcagcaggagcgacacgaccaggattgggcggcgcccgtcccagctgtagagcccacacgtcagcagccggggcgtgcatgcaagcggactattgatcggggtttgccaggtgcacagcagccaagtgagaaat

SEQ ID NO: 2717 - DNA, 345 bp, Chlorella vulgaris
ttccgggtccacccacgcgtccgcacacgcgtccgcggacgcgtggggttttgggctgtccgtcgccaagaagagcggcagacaaaatggatacgcccgtgaagctggccatcgtgatgaaggtcatcggcaggactggcagccgtggtcaggtgacccaggtgcgcgtgaagttcctggatgaccagaaccgcctgatcatgcgcaacgtcaaggggcccgtgcgcgagggtgacatcctgaccctccttgagtctgagcgcgaggctcgtcgcctccggtaatgcgggaggagctgggggcgctggcgcaagatgtgacccctgcgcgcctggaacagcagtg

SEQ ID NO: 2718 - DNA, 380 bp, Chlorella vulgaris
ttcccgggtccacccacgcgtccgcacacgcgtccgggcacccgccaggtgacccgcgcctctgtggagtggtacggccctgaccgcgccaagttcctgggtcccttcaccaaccccccctcttacctgaagggtgagttcgctggcgactacggctgggacacctctggcctgtccgctgatcccgagaccttctcccgctacagggaggttgaggtgatccatgcccggtgggccatgcttggcgccctgggctgcgtcgtgcccgagctgctggaccgcaacggcaccgtcaactttggcgagaacgccgtgtggttcaaggctggtgccgccatctttggtgatgacgggctcaactacctgggcaaaccctccct

SEQ ID NO: 2719 - DNA, 383 bp, Chlorella vulgaris
  unsure (1)..(383): unsure at all n locations
ttcccgggtccacccacgcgtccgcacacaacaacccgtagctatgcaggcctgcctgaccatgcagtccgccctgtgcggcaaggccaccagccaggtgttcgccgccaaggccaagaaggctgtgcgtgtgagcaccgttgtgcccgccgaggcagcgcccgctactgangagaagaaggcctgagcgcctcccaccctgaaccccgccaccccctcccccatcttcggtggcagcaccggcggtctactgangaaggcgcatgangaggagttccacgtgatcacctgngagtccaagaaggagcagatttttgagatgcccaccggcggcgctgccatcatgcgccagggccccaacctgctcaagctgtcccgcaagg

SEQ ID NO: 2720 - DNA, 352 bp, Chlorella vulgaris
gtcctatagtgagtcgaattattgcattaggggttccggtctaagcagcaatcatggctgaccagaccgagagggccttccagcgtcagctcggcgtgtcccgggggtaccagaagattggcatgaagaaggtccccggcaagggtggcgagcggtggtacaagaacattggcctgtgcttcaagacccccaaggaggccattgagggcaactatattgaccacacctgcaccttacacaggaatatgtcaatccgttggcgtaaccttgcttctactgtccagtccacttccatcctgtgtaacaatgagttccaccgttacaactttccttttacctcaaggtaccatta

SEQ ID NO: 2721 - DNA, 459 bp, Chlorella vulgaris
  unsure (1)..(459): unsure at all n locations
taccggacctacattcccggggccacccacgcgtccgggacttgaaaggatattgcctggcagtgccgagcttggcaccatgcaggcgaccaggatgcaggtgaagcccgccctggcgtccagcttcttcaccggcagtaggatgaggctgcagtgcttctccacgcgggtggtgcggcccactgtgacagcagtacgggcagcagcagcagcagcagctgaaactgaggagaggtacaggttgaacaacctatcgccgcagcctggcgcacgcaagcagaagaataggaagggacgtggctatggtgcaggccagggtggcacctgtggtttcggcatgcgcgggcaaaagtccaggtctggcagcggcatccgccccggctttgagggtggtcagactcggctgtataggcgcctgccanagcttcggggtattgctggaggcatgggtgctgggat

SEQ ID NO: 2722 - DNA, 418 bp, Chlorella vulgaris
  unsure (1)..(418): unsure at all n locations
ttcccggggtcacccacgcgtccgcagcattggctcactagcgtctccctagccttgcccaaatttcagtccataaacaggaaccatgcagtgcgccatgtccctgaccgtccgccccacccgtgtattcggggccaagcccatgaaggctcgcgctactcgcggcatgaaggtgcaggcctacaaggtcaccctcaagacccccagcggcgagagtgtgatcgagtgctccgaggatacctatatcctggacgctgctgatgaggctggcgttgagctgccctactcttgccgcgctggtgcctgctcttcttgcgctggcaagatcgagtctggcgaagttgaccagagcgacggctccttccttgaggacgagcagattgccangggctttgtgctgacctgcgtggcatacccc

SEQ ID NO: 2723 - DNA, 349 bp, Chlorella vulgaris
ccacgcgtccgcaaacgcgtccggcagcaccggcactgtccgcgcaaatttcaaggaaaaactggcaaccaacttccttgggcccaaaggtccccttaagctccaacccaaccctttccaattgaactaaaccggccccccaacctgccggcaacatgcacggcagcagtggcgatgcgcggcagctgtgccggagcaaactggagtgagggacgggccccgcgcactggcaggggcaagtgcttcggtgggctgtagcaagctcagcacagcacagcatggcgcagcagccgtgctatgtgtggtgactgtgcatggagcggggacaagagctggggctggccggctg

SEQ ID NO: 2724 - DNA, 415 bp, Chlorella vulgaris
ggtccaagattcccgggtccacccaagcgtccggatgaggagctggagaaggagaacgcaaagaagaccactgccctcaagggtcaggcggtgttctccattgccaaggttgacactgtcaccggcgagatttctggtgtgttcgagtctgtgcagccgtctgacactgacctgggtgccaaggcccccaaggatgtgaagatcaccggcttgtggtatgcccagctcaactgattgtccggctccctgagctcagccaggactacgctagtggcttggttaccattgagttctgctgcccagtaggcttcctgcctgtgtcaacaggagttctatcgttgcatctgtgcttttgcatcaggagaagattaaaagctatgtttgttggtgcatcctgcacaagggattgtgttac

SEQ ID NO: 2725 - DNA, 363 bp, Chlorella vulgaris
ttcccgggtccacccacgcgtccgcacacgcgtccgcagagacagaggagctgtgcaaagccagcgatgcagtgctgctgtcctgcataggcggctacaagtgggactccctgcccaacccgcagcggcctgagaagggcctgctacgcctgcgcgcctcgcttaacgcctttgccaacctgcggcccgcggtcgtgctgccgcagctggcagatgcctccactctcaagccggaggtggtggcgggcgtggacatcctcattgtgcgggagctggtgggcggcatctactttggcgagccacggggctttgacacccgcaacggcgagaaggtgggctacaacacagatgtctactccgaat

SEQ ID NO: 2726 - DNA, 367 bp, Chlorella vulgaris
ttccgggtccacccacgcgtccgcacacgcgtccgcccacgcgtccgcccacgcgtccgcccacgcgtccgcccacgcgtccggcagtacatgacatgcctcatgctggtgtacttcgccgagtatgccatgcagtcaggcacctggtcagccatagggttcccagtgcatgaagccaaagcccggcacaccttctacacatattccaactggatgtaccaggcgggggtgtttgtgagccggtcctcgggcatgatatatcaggcctcccgggcccagctgtgggccatgcctgcgctgcaagtgggctggctggcctttttccttgtggatgcggtgcacaagttctggtacaactactggctgc

SEQ ID NO: 2727 - DNA, 420 bp, Chlorella vulgaris
ggtcctaggattcccgggtcgacccacagcgtccgcccacgcgtccgcggacgcgtgggagaccgtgggcgagtacggcctgcgcaacaagcgcgagctctggcgtgtgcagatggtgctgtccaagctgcgctccagggcccggtccctgctgaccctggacgagaaggaccccaagcgcctttttgagggtgaggccctcatgcgccgcatgtaccgctacggcttcctggacgagacccagaacaagctcgattacgtgctggcgctcaaccctaccgacgtgctggagcgccgcctgcagaccctggtgttcaagctgggccttgccaagagcatccaccacgcgcgcgtgctcatccgccagcgccacatccgcgtgggcaagcagattgtgaacatcccctccttcctggtccg

SEQ ID NO: 2728 - DNA, 370 bp, Chlorella vulgaris
caagaccctatagtgagtcgaattattgtacgtgagtggcaatatcctcggatacaagaggggcaagtccaaccagaccaaccacacctccctgatcaagatcagcggcgtcaactcaaaggctgagaccgaattctaccttggcaagaagattgccttcatctacaaggccaagaccgagaagaagggcagcctttatcgcgtgatctggggcaaggtcacccgtgcccacggcagcaccggcactgtccgcgccaagttcaggaagaacctgccacccagctccctgggcgccaaggttcgcgtcatgctctaccccagccgtatctagtggactgaagcggcgccgccagctggcgggcagcatgca

SEQ ID NO: 2729 - DNA, 343 bp, Chlorella vulgaris
tcccggggccacccaagcgtccgcagcgagatcaagaacggccgcctcgccatggttgccttcattggcttctgcgtccaggccctggtgacgcgcaccggccctctggagaacctcgcagcacacctgtctagccccttcgagaacaacttcatcaccaacatcgccaacctgccccagaccctgtcccagtgagctggccgacagtgtgtcacctggcagcatgctatacctagctaaaggtagtctttgaggagggagcctagcaaggcttgtgttggatggttgctggcagcttgggtgaaagtgatggtgcagtatctgcataaggtatgctgttggc

SEQ ID NO: 2730 - DNA, 203 bp, Chlorella vulgaris
ttcccgggtccacccacgcgtccgtatccctctagtgagagtaaagtcacccactaggtatcgcggagatatttgtgcacaacatgaactgctcttttgccttgaaggggacgccttttgacaacttactgctggttattcatcagtacaacctatgggcataatgccttgactgtgcactactaagtgtagtatgacatgac

SEQ ID NO: 2731 - DNA, 347 bp, Chlorella vulgaris
tccacccacgcgtccgcacacgcgtccgcggacgcgtgggcggacgcgtgggcggacgcgtgggcaacgtgatgggccagggccggtggcccaagatgagctgcgagttcctgctgggcctgctcaaaaatgccgacagcaatgcagatgtgaagggcctggacacggacgccctgtacgtgtctcacatccaggtcaacaaggcgcagaaggggcgccgcaggatctaccgcgcacacggccgcatcaacccctacatgtctagaccctgtcacattgagctcatcctgaccgataaggaccagtcagtcaaggccgagctggaggagaagagcgagcgcaagctg

SEQ ID NO: 2732 - DNA, 350 bp, Chlorella vulgaris
gtgagtcgtattaagatcattcgcctgcgtggggtgccaggacacgtcctgcaatgccggccccgggccctctttggtggtcgcgctgaggtcacccgcaagaagttgggcatctgtggccatggacgccgtactagccctgaagctggctcctgcgtgcgcaggcattgctgaggatatggttgattggtcgaacatcaccaacgacctatgtacgcaccaggacctggcgagaagcacggacacctttgtacgctcatgtagcgtcaccaataggatcagcagcttccccaagtagcttgctgagttgggaactctcaacgtagacgggtgacgtcaggttcattgag

SEQ ID NO: 2733 - DNA, 161 bp, Chlorella vulgaris
gggtccacccacacgtccgccacacgcgtccgggcgcgcacaggtatcgccgtgggccttaccaagggccatgtggtcaccaagacagagaaggccgtgaggcccgctaaccgcaaggggaagctgtccaagcgcgtcaagtttgtgcgtgacatcatccg

SEQ ID NO: 2734 - DNA, 341 bp, Chlorella vulgaris
ttccgggtccacccacgcgtccgcaacggcctccgactgacaagctttactcttgatgataccaacgaatgcatgctggggcgctggtgctgctcgtagcaaggcaaaggcgctgttgaatgaatgtctcgcttgctcgctctcttgctcggaggcattgctagtgagggaccagggtgggtgagggggcggcccgttcccttgcgcaccctgcgacgctgtttatgcttttcatggctgtacagaggcacttggcagttcctacggcacgcattgattggtgttcaaattggctgggagccggtactagggcgcacacatattctgaggagctgggtttt

SEQ ID NO: 2735 - DNA, 382 bp, Chlorella vulgaris
gcaagtcctataatgagtcgaattacgcgtccgcccacgcgtccgcccacgcgtccgcggcgagctggtacagaagtacatcggcgaggggtcacgcatggtgcgagagctgttcgtcatggccagggagcactcgccttccatcatcttcatggacgaggtggattccattggttcagcacggatggacaacagtggcggcgggggtgacagcgaggtgcagtgcaccatgctggagctgctcaaccagctggacggctttgaagccagcatcaagatcaaggtgctgatggccaccaatcgcatcgacatcttggacccggccctgctgcgccccgggcgcatcgaccgcaagatcgaattccccaaccccaacgagggg

SEQ ID NO: 2736 - DNA, 383 bp, Chlorella vulgaris
ttcccggggccacccacgcgtccgcagacgcgtgggtgtgaaaccccataagcagcttaagtagggcactgggtgtccagcgaggagaggcgtgccaaacccgtctgcgaaaggtcttaaggtacacagtcatggccgccacccttcaagccccagcgcccctgaggccccctgctgccgcctctagcaggcgcgccagacccctggctgcccggtcttcggctggagcagtgcaagtgtgtggactagaccaggaggccgctgctgcacgcatggcgctggcacccccttctgtgcaggccttcatcgcccggtggggaaggcgcgacggcattgatgccgcctactctgcagcatgcaccatcaactgggagtcagccatt

SEQ ID NO: 2737 - DNA, 451 bp, Chlorella vulgaris
ttcgcgggtccacccacgcgtccgaggacgcgtggggccgcgcgggccgcagcaggcgcagcagacggagcagcagcagcggccggcctccatcatggtggccgactaccccagccagcagccggcatgggaggacccgcgggcggaggcggacatggcctacatactcaccgtggtcaacaggacccgctcgctgcgcagcgactacgagctcacgcggcagcgcccgccgctcttcctggcctgcaaggatgctgcgcgcgctgagctgctgcgcagcgcgggcatggagctgaccacgcttacgtcatccgagacctccaccgtgctggaggatggccaggcggcgccccaaggttgcggcgtggccgttgtggacgacaccacgaccctctacctgctgctcagcggcatcctggatgcggccaaggagattgagaagctgggaaag

SEQ ID NO: 2738 - DNA, 379 bp, Chlorella vulgaris
gggtccacccacgcgtccgcacacgcgtccgcagccagcctttgcaaaggttcctcgaagtctccacaatggccgccgctatgtgccagacctctgttgcccgggccttcgcccctaaggtggctgcccagaagcgccagcgcgctgttgccgcccaggcctatgttggcaactggctccccggcagcgaccgccccgcctacctggagaagctccctggtgcctacggctttgaccccctgggcctgggcactgagcccaagagcctggagcgctttgtggaggctgaggtgattaacggccgctgggccatgctgggcgttgccggcatgctcggcgtggaggccctgggctacggcgactggtacagcgcaaccct

SEQ ID NO: 2739 - DNA, 456 bp, Chlorella vulgaris
aagtccctagaatgagtcgtattaggcgacgctgctgtgtggttcaaggctggtgcctccatcttcggcgatgatggcctgaactacctgggcaacccctccctggtccatgcccagtccatcgtggccaccctggccgtgcaggtcatcctcatggctcaggctgaggctttccgtgtgagcggcactgccccctgtagcggcgaggagctcgacaccctgtaccccggtgatgcctttgacccccttggcctggctgacgaccccgacacctttgctgagctcaaggtcaaggagatcaagaacggccgcctggctatgttctccatgttcggcttcttcatccaggcacttgtgaccggcaagtctcccctggagaacctggccgaccacctggctgaccccgcctccaataaccgctttctcatcctgaccgccaacacagttaaccccctg

SEQ ID NO: 2740 - DNA, 72 bp, Chlorella vulgaris
aaaaggttcaaagcttacttacgcgtgcatgcaacgttcatagctcttcaatagtgtcacctaatttcattt

SEQ ID NO: 2741 - DNA, 324 bp, Chlorella vulgaris
gggtccacccaagcgtccgaaatgattgacaccatcgccatcaccaagggccacggcactgagggtgtggtgacccgctggggtgtgtcccgcctgccgcgcaagacccatcgtggtctgcgcaaggtcgcctgcatcggcgcctggcacccggcccgcgtgtcctggaccgtggcccgcgctggtgccatgggttacaaccaccgcacggagatgaacaagaaggtgtaccgcgtgggcgtgaagggcgacgccagccacaaggccaccaccgagtttgatgtgaccgacaaggacatcacgcccatgggcggcttcccccac

SEQ ID NO: 2742 - DNA, 71 bp, Chlorella vulgaris
caaaggttccaaccttaggtacgcctccatgcaacttcaaacctcttctaaagtgtcaccaaatttcattt

SEQ ID NO: 2743 - DNA, 402 bp, Chlorella vulgaris
acaagaccctagaatgagtcgtattacgacgccagcagctgtgaatccgaggagctgcaaagagcagggtgcttgggctgctggtctacgcaccaagatgatgatgaggaggcccccaaacgcagtagagacccagatctgaatgccggggttgcagcagagtctggcgacgcaggtgccaaggcagcttcaaaaagccgcggcctgctaagatggctcagtcgctgcaagcccgcatggctgggggtgcggagagcaaacaccagcgtagcaagcgccaggaagctgtcctggctgggccgccagcggcttatgttgacagagactgcagcggagatggggtgcaacaagcactttgcgctgcacctggcattgaagctgcagcggtacacgctgggctgt

SEQ ID NO: 2744 - DNA, 362 bp, Chlorella vulgaris
cacccacgcgtccgcaagacactacagtctcgaataagatggccaagtcgaagaaccacaccaaccacaaccaaaacaagaaggcccacaggaacggcatcaagaagcccaagaggcagaggttccactcaaccaagggcatggaccccaagttcctgcgcaaccagcgttatgccaagaagcacaacgtcatcaagggggaggaggagaagtgatcagctggataccttccatggagccctgaggtcgtagccagcttagaggaggatggttgtggtggcccgcttgctcgggcgggacttggcgcagcagtgttatgcgcaggatgcagcgacagttttacagtggctgactttgtaacc

SEQ ID NO: 2745 - DNA, 495 bp, Chlorella vulgaris
  unsure (1)..(495): unsure at all n locations
cctgccggtaccggatcgacattcgcggggccacccacgcgtccggacaacacttgactggctttacttcaaggctaactttcatggtactgcaagtgcaggcttgcgcctttggtcgctttcagcaacaaagcctcaaatcaggtgtcggacctaggaagtgtcagcagttgaaggggcatgtcatggcctcggctacagcccctggaaagctcgagggacttgctctcaggccagccacttggcaggagatgcctaccatcttcagcaaggtgctgcaagcaaggatgaatccacttatcggtcttaacccgcccgacttcaccgctgcggaaagcgatgggcgtctggtgggctttgggagggttgaacccgctgcagcctggggcagtggagatgacatcaatttttggttttccggaacatangggcaggggtgtangaactgctatcatccggtccctctgtgccagtgccggcagtcaggacgtttac

SEQ ID NO: 2746 - DNA, 418 bp, Chlorella vulgaris
agattcccgggccgacccacgcgtccacccacgcgtccggatcaagctcagggtgctcaagttctacaaggtagacgacagcggcaaggtgcagcgcctgcgcaaggtttgcccccagtgcggccccggcatcttcatggccacgcacttcaaccgcgtgtactgcggcaagtgccacctcacctacgtctatgacaaggatggagccaaggcataagcagcttgcgctcactgccctggcgggctgtggtgcccccagggaaactcttcgtctagtagggcgtgccctaaccagcagcctagtggacggagagccagcccgtggtaggcagcctggcagctcctcgtgcgtcctgcttctctggactgactctgggcagcagctggggtcggaggtcgtctgtctcgacccctgctg

SEQ ID NO: 2747 - DNA, 455 bp, Chlorella vulgaris
ggtctacaattcccgggccgacccacgcgtccagtcgacaacaggtccaaggttcacaagatgcagaccctctctgcccgtttcggcgtccgcgcccctgtctcccggggcacccgccaggtgacccgcgcctccgtggagtggtacggccccgaccgcgccaagttcctgggccccttcaccaaccccccttcctacctgaagggtgagttcgctggcgactacggctgggacacctctggcctgtccgccgatcccgagaccttctcccgctacagggaggttgaggtgatccatgcccggtgggccatgcttggcgcccttggctgcgtcgtgcccgagctgctggaccgcaacggcaccgtcaactttggcgagaacgccgtgtggttcaaggccggtgccgccatcttcggcgatgacgggctgaactacctggggcaaccctccctcat

SEQ ID NO: 2748 - DNA, 431 bp, Chlorella vulgaris
ttcccggggtcacccacgcgtccgcaccgacaccagccagtggtacggtcccgaccgccccaagttcctgggccccttctccgagggtgctgtgccttcctacctgaacggcgagttcgctggtgactacggctgggacaccgccggcctgtccgccgaccccgagaccttcaagcgctaccgccagattgaggtcatccatgcccgctgggccatgcttggcgccctgggctgcatcttgcccgaggtcctgcagaggtacagcggcatcgagttcggcgaggctgtgtggttcaaggctggcgctcagatcttctctgacgacggcctgaactacctgggcaaccctgccctcatccacgcccagtccatcattgccaccctcatcacccaggtggtgctgatgggcgccgttgagggctaccgcacca

SEQ ID NO: 2749 - DNA, 415 bp, Chlorella vulgaris
gcctttgcaaaggttcctcgaagtctccacaatggccgccgctatgtgccagacctctgttgcccgggccttcgcccctaaggtggctgcccagaagcgccagcgcgctgttgccgcccaggcctatgttggcaactggctccccggcagcgaccgccccgcctacctggagaagctccctggtgcctacggctttgaccccctgggcctgggcactgagcccaagagcctggagcgctttgtggaggctgaggtgattaacggccgctgggccatgctgggcgttgccggcatgctcggcgtggaggccctgggctacggcgactggtacagcgcacccctctgggccgtgactggcggcaaggcgacctactttggcgcggagcctgcctttcaagtgcgacctgggcaacct

SEQ ID NO: 2750 - DNA, 392 bp, Chlorella vulgaris
ggtcgacgcacgcgtccactcaggttgtaaaaaagcgtcgccatggcttcaaaaaggaagggcggcgttggtggcaacaagttcaggatgtcgctgggtttgccagtggccgcaacaatcaactgcgctgacaactccggcgccaagaacctgtacatcatctccgtggccggctggggcgccaggctgaaccgcctgcccgccgccgcccccggcgacatggtgatggccaccgtgaagaagggcaagcctgacctccgcaagaaggtgcaccctgcggtggtggtgcggcagcgcaagtcctggaggcggaaggacggcacctacatctactttgaggacaatgcaggcgtcattgtgaaccccaagggcgagatgaagggctccgctat

SEQ ID NO: 2751 - DNA, 434 bp, Chlorella vulgaris
ccacccacgcgtccgaaaaaaagaaaaaaaaaaaaaaaaaaaaataaaaaaagacaaacaaattaaaagttccaatccttatataaaaaattatgcaaagttaatacctcttctcccaagtccctcattttcattacaaaaatgggcggccctcctaaaggttccaagcttacttccccttgcttgcaatttcataccccttctaaagtttcccctaatttcatttcacgggccttctttttaaaacttcctccttggaaaacccctggctttccccaatttaacccctttgcagaaaatcccctttttgcaaactggcttattaccaaaaagtccccccccttttccctttccaaaaatttcccccccctaaatggcaattggacacccccctttaccggcccattaacccccgcggttttggggtttacccc

SEQ ID NO: 2752 - DNA, 395 bp, Chlorella vulgaris
cgcacgcgtccaaccacgcgtccgcttacaggtagtgagagtgccaccaaagccgccagaatgcagaccaccttcgtgggcaccacccaggcgctgcgcgccaaggtctccacccaggccactcgtggctccaaggtagcaacctccatgcgccgcaccgtcaagtccaagaacgtgaagaccaccgacaccagccagtggtacggtcccgaccgccccaagttcctgggccccttctccgagggtgctgtgccttcctacctgaacggcgagttcgctggtgactacggctgggacaccgccggcctgtccgccgaccccgagaccttcaagcgctaccgccagattgaggtcatccatgcccgctgggccatgcttggcgccctgggctgcat

SEQ ID NO: 2753 - DNA, 400 bp, Chlorella vulgaris
ccgggccgacccacgcgtccacccacgcgtccggcgtccctgtccctgtctaccagggtaacccatcagcagggattgaaggccaagaacaatggtcaggcacaacaacgtggtgcccaaccagcacttcaggaagaagtggcaggacaaagtcaggacctggttcaaccagcccgctcgcaagctccggaggaggaatgcccgcgccgagaaggccaagaaggtgttcccccgccccaccgcgggcgcgctgaggcccatcgtgcacggccagaccgtcaagtataacatgaagaagcgcgcgggccgcggcttcacgctggaggagctcaaggaggctggcattccctccaagcttgcccccaccattggcattgcagtggaccaccgccgcaagaac

SEQ ID NO: 2754 - DNA, 441 bp, Chlorella vulgaris
attcccgggtcgacccaaacgtccgcccacgcgtccgaacaaactgcgggccagccaagtacttggcttctgcagctggtttgtgaaaactaggacctactttgattcatctccatagatgtgcatgcaaggtcctgtggctgcagcttgttgggccccctatcctgcagtatacgactctggctccttctgctgatgggcaagaaggtcacgcagggcgcagccctccaggatgagcagcaggagtccctcccagccttcctgaaagccaaaggcagtaactcctgctctctatcagtgcatgccaagcctggcgccaagacttgtgggctggtcctaggagcagaggcagttgatgtcacgatagatgccccggcgcgggaaggtgaggctaatgccgcgatactagagtacgtagctggtgttctaggcctgaagaag

SEQ ID NO: 2755 - DNA, 396 bp, Chlorella vulgaris
ggtctagaattcccgggccgacccacgcgtccagtgccaccaaagccgccagaatgcagaccaccttcgtgggcaccacccaggcgctgcgcgccaaggtctccacccaggccactcgtggctccaaggtagcaacctccatgcgccgcaccgtcaagtccaagaacgtgaagaccaccgacaccagccagtggtacggtcccgaccgccccaagttcctgggccccttctccgagggtgctgtgccttcctacctgaacggcgagttcgctggtgactacggctgggacaccgccggcctgtccgccgaccccgagaccttcaagcgctaccgccagattgaggtcatccatgcccgctgggccatgcttggcgccctgggctgcatcttgcccg

SEQ ID NO: 2756 - DNA, 151 bp, Chlorella vulgaris
ggtcgacgcacgcggctagcgggaatgggcagcggtggctcttggcggcggtgtgctggtgttgcggctgccctacctgcctttagaatcgatgtgtgcagaggtcaaatcttgcagaagaggctgcagcaaggccggttgtgtaatatgg

SEQ ID NO: 2757 - DNA, 466 bp, Chlorella vulgaris
ttcctgggtccacccacgcgtccgtatacagtcggccaacatggttagccgtctgagcaagaaccgcaagaagcgcggtcatgtcagcgccggccatgggcgtatcggcaagcacaggaagcaccccggtggccgcggtaacgccggtggccagcaccatcacaggattatgatggacaagtaccaccctgggtactttggcaaggtgggcatgcgctacttcaacctgaagaagaacaagttccactgccccatcgtcaaccttgacaagctgtggagccttgtgggcgaggaggctcgtgttgaggcctccaaggactcgagcagcgctgccgtgattgatgtcaccaagtatggcatcttcaaggtgctgggcaagggcgagctccgcagcagcagtggtggtgaaggccaagtttgtgagcaagctggcggagcaaaaaatcaaggccgtgggttgccccgt

SEQ ID NO: 2758 - DNA, 164 bp, Chlorella vulgaris
ggctaacgggaatgggcagcggtggctcttggcggcggtgtgctggtgttgcggctgccctacctgcctttagaatcgatgtgtgcagacgtcaaatcttgcagaagacgctgcagcaaggccggttgtgtaatacggaaaacaggccaaaaaaaataacaaac

SEQ ID NO: 2759 - DNA, 401 bp, Chlorella vulgaris
attcacgggccgacgcacgcgtccacaggaagcagcaccgcaaggaccaggaggcgcaggttgcgcgcaagaagcgcaggtctgccaccaaggtgcagacgcgctcaattgtgggcgtgtccctggaggtgattcagaagaagaaggcagagaagcccgagcagcgcaaggcctcacgcgaggcggccctccgtgagatcaaggagcgtgccaagaaggcaaagcaggacaaggctacccagaaggccgccgcgaaggccgctgcccccaaggcctccaagaatgtgccccgtggcgctggcaaggcaggcgccaagtccactgggcgctgagctttgcggctagcgggctgtgggagcgagtggtgcgggcggcagcggcagcgcatggcatcggacaca

SEQ ID NO: 2760 - DNA, 472 bp, Chlorella vulgaris
ggtaaaggtccagaattcccgggccgacccacgcgtccaggtttctacccaggcccactcccccaggcagaaacaagatggtggctctccagattctcgcagcgactgccaagggcaccgtcaagggtaccgttaagggtaccgcaaagcaggcagcgaagaccgtgaagaaggcggccatcaagaccgcaaagaaggtcgcccccaagaagggtggcgtggagtggtacggccccaacaggcccctgttcctgggcccctacagccccgagcccccgagccacctgaagggtgagttcgctggcgactacggctgggacacctccggcctgtccgccgatcccgagaccttctcccgctacagggagattgaggtgatccatgcccgctgggccatgcttggcgcgctgggctgcgtcgtgcccgagctgctttgacagaccaacacgtgccctggttcaaggctggcgcc

SEQ ID NO: 2761 - DNA, 421 bp, Chlorella vulgaris
ccgggccgacccacaacgtccaaacggcaccgtgttcagccgggaggctggtaacctgtataaccgcaactcctacaagtattctggcctggccaacttcaactccactgtggatgttgctgcggctaaggatggcggggtgcaggtgtccaagtcccgtggcaagaacgccagcaagcccagcgctgcccgtgctgtgtctgtaatcaagaagaacgctcgccgcaccaactacgctgtcggcgctgaggcgcagcgcgtgcgccccgacctcaagaaggctgccgttgcccgtgcctccgccgtcaccaagagccagcgtgtgaagaagagcgccgctgcctccagctgagcaaagcgtgcagcatagcaggcacagcaaagggcagcaggagcgcagcacgaggctgggacagcacgt

SEQ ID NO: 2762 - DNA, 438 bp, Chlorella vulgaris
ggtaacggtccagaattcccgggccgacccacgcgtccacagacaaggagatagcagcgtataaggcagaaagagagaccgagtttcagaggaagatggcttcggactctagcagctcgcaggaaaatgttgtccggcttggagaggaatcctcacgcgctgtcaaggccatccaagacagcatacagcaaaagaaaaaggaggtgctgaagttgctcctggaccacgtgacctcggttaagcttgtcaaggactgagaaaccgctggttgtaaccgtctttgccaataccagaaaggggttcaattgatgtgtcactgggctggtaatcagtgtgtgtcttgaatgtacttgatgagtacctgccactttgctgctaggcataaaagagggcatgtacgtcagtggctcaaattgtctgggctgactgtgctgcatt

SEQ ID NO: 2763 - DNA, 440 bp, Chlorella vulgaris
ttccaggtcgacccaggcgtccgcaccgcatgacgcgtgctgcgccgcctgctcaagaagtacagggatggcaagaagatcgacaagcacctgtaccacgagctttacatgaaggtgaagggtaatgtgtacaagaacaagcgtgtgctcatggaggccatccacaagcagaaggcagagaagattcgcgagaaggcgattgtggaccagctggaggcgcgccgcgccaagaacaagcaggcacgcgcccgcaaggccgcccgcagggaggagcgcttcgcaacagggcagatcggcactgccgccaccgagtccaagaagtaaatgagccacccttggtgttggctgactgccggctggctgggtgctgctggctgctgttgaggccgttaacagcaaggacagggtcactggtgaatggcagctgttgccgtcgctac

SEQ ID NO: 2764 - DNA, 461 bp, Chlorella vulgaris
ccggtctacaattaccgggccgacgcacgcgtccacccacacgtccggtggaatcccccgtcgacaacaggtccaaggttcacaagatgcagaccctctctgcccgtttcggcgtccgcgcccctgtctcccggggcacccgccaggtgacccgcgcctccgtggagtggtacggccccgaccgcgccaagttcctgggccccttcaccaaccccccttcctacctgaagggtgagttcgctggcgactacggctgggacacctctggcctgtccgccgatcccgagaccttctcccgctacagggaggttgaggtgatccatgcccggtgggccatgcttggcgcccttggctgcgtcgtgcccgagctgctggaccgcaacggcaccgtcaactttggcgagaacgccgtgtggttcaaggccggtgccgccatcttcggcgatgacgggctgaactac

SEQ ID NO: 2765 - DNA, 204 bp, Chlorella vulgaris
taaagattcaaaccttacttacccttccatccaatttcatacctcttcaaaattttcacctaatttcatttcattgcccttctttttaaaacttcttaactggaaaaaccttgcctttacccaatttaatcccttttcaaaaaatccccttttcccaaattggcttattaccaaaaagccccccacctttcccccttccaaaaa

SEQ ID NO: 2766 - DNA, 365 bp, Chlorella vulgaris
gtgcggtctagaattcacgggtcgacgcacgcgtccacggacgcgtgggcggacgcgtgggcggacgcgtgggccaagggctgtggaggcgttttatatataaaaatgcctcccaaatttgatcccaactccattgtggaggtgtacgtgcgtgccaccggcggtgaggtcggtgccgcatcctccctcgcccccaagattggtcccctgggtctctcccccaagaaggttggtgaggacattgccaaggagacgtccaaggattggaagggtctgcccttgaccgtcaagctaacggtgcaaaaccggaaggccaaggtgaccgtaatcccttccgccgcggcgctggtcatcaaggcgctcaa

SEQ ID NO: 2767 - DNA, 324 bp, Chlorella vulgaris
aattcccggtcgacccacacgtccaaacatgaacactgatcctgaaatgggggcacgccacggaggattacacaaatcggccaacgaatgactttgccaggggttggttcgttgcttgcattcgttgcttccaccgggtcaccttgacgtcacggaatgctgggaaagtggagcagcagcaacgtctacttttgcagaaccaagggatttgccaaaattgcccttgtcgcatatgcgggcatgccatcattctggtttttgcaggatacgttgcactttacacttttcgcgactgccgacatatgcatatagtatcagacgttc

SEQ ID NO: 2768 - DNA, 352 bp, Chlorella vulgaris
  unsure (1)..(352): unsure at all n locations
attcctaggtcgacccaggcgtccgcccacgcgtccgcccacgcgtccgtttcgttccaggcacgctgtcaagcctacagcctaggtgcgcgttctaaggagcccggggaacaacgtaaccgagggaatggcccgtttggggctcgtgctcagcgttttgtttctaggagcagcagctgctgctgcgcagttcatcctcccaaactttggtgggcagttccccacgcaagcggaacagccaggcttcgatatggctgacaacgggggcccccagagctgggccaacctggtgggcanagacacagcgaccgcacaagctgtcatccgaaaggaccccaccggcaagcgggtg

SEQ ID NO: 2769 - DNA, 454 bp, Chlorella vulgaris
gtccagaattcacgggtcgacgcacgcgtccgatcatgcccggcaaggtcaaccccacgcagtgcgaggccatgaccatggtctgcgcccaggtgatgggcaaccacgtggcagccactgtgggcggctccaatggccactttgagctcaacgtgttcaagcccatgctcatccgcaacctgctgcactctacccgcctcctgggcgacgcctgcgactcctttacagagcactgcgtggcaggcatccaggcgaatgagacccgcatcagcaagctgctgaacgagtcgctcatgcttgtcaccgccctcaacaacaagatcggctatgacaaggctgctgccatcgcaaagaaggcacacaaggagggcagcaccttgaaggaatctgcgctggcactcggctactgcacggaggctgagtttgatcagtgggtgcgacctgaggacatgat

SEQ ID NO: 2770 - DNA, 418 bp, Chlorella vulgaris
ggccacccacgcgtccgcattagaaagtggtaccgctattagcttgtgatggcggcccgcaccctcctcgttgcggcacttgccgtcgtgctggtcactttcgtggcggcagatggaagcatcgactcggaaatcgaccaccttgagggcgagtgcctagaagagatcaacgagctttgggagaaatatacagagggcccagcggtggagggctgcgacgaggcctgcctacgggagtgctaccagatactccaagacgctgtctggggcaccaagaacaaaaattgccccttgcagtccgagattcagcgttgtttccacgtattttccgatgactgggaggactatgtgaaggagtgcgagcttttcgtcttttcggatagcgagagtgaaggcgagtcatcctccggcgaaggtg

SEQ ID NO: 2771 - DNA, 419 bp, Chlorella vulgaris
attcacgggtcgacgcacgcgtccacggacacgtgggcgctgtccgccttgacgcccgcctgttgggaagtcagcatggctcacacgttgttgtttgaaaagcattggaaggggtgggcgtggtgctgtggctctcccagtctccctgctactacccttctgagtggggcacaggtggtgcgctgtttattgcggcgggtaccgcctcagctggcatcggccaaccctgcgggtgttgctggctgttgttgtagcttgaactggcctcaagtgttgtgggagtctcggcaattgccgccaacctgaggccgattattgcagggagtgttgtcatcgctcccctactacaggcttgccagcatgagtgccctccttcgtaagacaagattgatattggaatggtcttgctgtccggtgct

SEQ ID NO: 2772 - DNA, 380 bp, Chlorella vulgaris
ggtctacaattcacgggtcgacgcacgcgtccgcccacgcgtccgcccacgcgtccgcggtctgcctgtttgtggggttcccccttaaagtttgcattcaggcaccaaccaaaaatgtccaagtctgagcttgcctgcgtatacgccgccctgatcctggcggatgagggtgccgaggtcagcgccgacaacatggccggaagcgtgaaggctgcgggtgtggatgttgagccctactggcccggcctgtttgccgagctggccgagaagaagcgcatcgaggacttcatcgggaacgttggcgccggtggcggcgctggccgggctgcgggcggggcggcacctgcggcgggctgtgccgctgatggcgcccccgccgc

SEQ ID NO: 2773 - DNA, 372 bp, Chlorella vulgaris
ggtcgacgcacgcgtccaggacatacttcagtctcacaccagctttccacattgcttcccagtgtctcatctctggcaccatggcccgcaagttcttcgtcgggggcaactggaaatgcaacggtactgtgaagagcaacgccgatctggtaaagaccctgaacgatgcaacggtcccaggaactgatgtcgtggaggtggtggtggcccccgcagctgtgcacatcacccacgtgaaggactccctgcgcaaggactttgaggtggcagcccagaacagctgggtgaagaaaggcggcgcctttactggcgagctcagtgctgagatgctgaaggacctggggctgaagtgggtgatcctgggccactctg

SEQ ID NO: 2774 - DNA, 433 bp, Chlorella vulgaris
attcccgggccgacccacgcgtccacccacgcgtccgcccacgcgtccggcctgtttgtggggttcccccttaaagtttgcattcaggcaccaaccaaaaatgtccaagtctgagcttgcctgcgtatacgccgccctgatcctggcggatgagggtgccgatgtcagcgccgactacatcaccgcaatcgtgaaggctgcgggtgtggatgttgagccctactggcccggcctgtttgccaagctggccgagaagaagcgcatcgaggacttcatcgtgaacgttggcgccggtggcggcgctgcccctgctgcgggcggtgctgcacctgctgccggcggtgccgctgatgccgcccccgccgccaaggatgaggagaatgttgaggaggaggaggaggaggacatgggcttctccctgttcgactaagcg

SEQ ID NO: 2775 - DNA, 427 bp, Chlorella vulgaris
aggtaacggtccagaattcccgggccgacccacgcgtccacggacgcgtgggcttcttctcaagcaacttgccgctaacgccgccggggccacaaccaccaactgcaacaacggggcatcggcctgcttgtgcgggcagagagggacttctaccaaatcttggggatgccccttgacgctgacaagaagaccatcaagtcagcatatcgccagctcgcccgcaagtttcatccggatgtgaacaaggactcggacgctgaggagaggttcaaggatatctcagcagcatacgaggtgctgtccgatgatgagaagaagttggtgtatgaccgctacggcgagcaagggctcaagggcgccgcgggcatggggggcatgggcggcatgggtgacatgggcggcttcagcaatccgtttgacctgtttg

SEQ ID NO: 2776 - DNA, 458 bp, Chlorella vulgaris
gtctagaattcccgggccgacccacgcgtccacggacgcgtgggcggacgcgtgggtctcgcccaaccgctactggctgtgcgcggccacccagagctgcatcaagatctgggaccttgagtccaagtccattgtggacgagctccgccccgagttccccgagcgcagcaagaaggcccaggtgccctactgcgtctgcctggcctggtctgccgacggcaacaccctctactctggctacaccgacggcaccatccgcgtgtggcaggttggccgcatcgcctagatgcccagtggcagtggcggcgtgacaccgactcatctcagaagacacacacagagcgaattcacacctttgctggccggctgtgggcagcagcagctggcgttgtagcagcaggatcgggagactggcagcagcgctggggggttggggcagcgcggggctgcgtgctgta

SEQ ID NO: 2777 - DNA, 431 bp, Chlorella vulgaris
ttcccaggtcgacccaggcgtccgaaaaagcgtcgccatggcttcaaaaaggaagggcggcgttggtggcaacaagttcaggatgtcgctgggtttgccagtggccgcaacaatcaactgcgctgacaactccggcgccaagaacctgtacatcatctccgtggccggctggggcgccaggctgaaccgcctgcccgccgccgcccccggcgacatggtgatggccaccgtgaagaagggcaagcctgacctccgcaagaaggtgcaccctgcggtggtggtgcggcagcgcaagtcctggaggcggaaggacggcacctacatctactttgaggacaatgcaggcgtcattgtgaaccccaagggcgagatgaagggctccgctattaccggccccgtggcaaaggagtgcgccgacctgtggcctcgtg

SEQ ID NO: 2778 - DNA, 413 bp, Chlorella vulgaris
  unsure (1)..(413): unsure at all n locations
ggtcaagaattcacgggtcgacgcacgcgtccaggcggaaagcaccaagatggcgaaggacaagtctcgctccgccgaagtggtgacccgcgagtataccattaacctgcacaagaagctgcatggcataaccttcaagaagaaggctcctaangccatcaangagattaagaagtttgcccagcaacaaatgaagaccagcgacgtgcgcgtggacgtcaagctgaacaaggccgtgtggagccagggcatcaagaacgtgcccaaccgcctgcgcattgtgatccagcgcaagcgcaacgaggacgacgacgagaaggaggagatgttctccctggtcaccctggccgaggaccagagcagcaagggcaagggcgtggtggtcctggaggcataaacacacacacgcgcct

SEQ ID NO: 2779 - DNA, 221 bp, Chlorella vulgaris
ccgggtcgacccacacgtccgagtaggcgtcagacccaggcgtccggcctgtatgtgtggttccccctaaacgtttgcattcaggcaggagacgggagtgtcgaagtctgatcgtgcctgcgtaaagacctccctgatcctgcccgatcacggtaccaatgtgcgctcctacaacatcaccgtaatgcttatggccgtgggtgtagatgtctagccctaca

SEQ ID NO: 2780 - DNA, 449 bp, Chlorella vulgaris
tccacccacgcgtccgcgaaagagtcaaaggcagacacaccatgcaggtgcaagccctcttcaagaagcttggcggctgtgcccccgctaaggcagccaagaatgccgccggtgcagccaagaaggccgttggcaacgccaagaaggtcgcctctggcaccaccaagggtggctggctgggcactgacagcaacaacatcgacctggacaggtggtacggccctgaccgcgccctgtacctgcccggtggcctgctggaccgctctgaggtgcccagctacctgaacggcagcctgcccggcgactatggctacgacccccttggtctgggcaaggatggcggcctggagaagtaccgcgccaacgagctgctgcacgcccgctgggccatgcttgccgctgctggcgccatcatccctgaaggccttgccgccaatggtgccgatatc

SEQ ID NO: 2781 - DNA, 360 bp, Chlorella vulgaris
  unsure (1)..(360): unsure at all n locations
tccagaattcacgggtcgacgcacgcgtccgcccacgcatccgcccacgcgtccggaatagattactcagttgtcctggttgcaacaatgcacctgtgctttgggatggagcatagtacacactcttgagctggcgtttgatcatgctgagcacctgnttgtgggcgtgctattttccagccctctatgtagcgccactttacttatggcgaggccttccgaggagccatccgacctccatcaggcggcgcatgggtgtcagtatcgtcaccagtgcagtagcttgggtgcccacctggctagccttgtcagctgaggagagacacatgctaccatccatcttggggctacgccctggca

SEQ ID NO: 2782 - DNA, 461 bp, Chlorella vulgaris
attcccaggtcgacccaggcgtccgcactatcatccaggcaacgctgcactactgctgccagccagcgcgcatctagccatcacagcctaacaaagccaacatggtcagttcggggcgcatccagagcccttgtcctgccggcaagctgctaacaacaatgggagtcgcctttggcctccctgctgtgaattacgttgccaacaataaaggccccttacaccacctaccccaagagcctaagcgtagagtggagggaagccgccaagctcccaaagattagggaggcgtcagacgtccctcttgcaccaaatcctctccgctgacggccgcggctgttgtagaaggctaccccatttccgtacggttatcccttgcgcgtcttgtacactatagtatcggtggtatggtgagcaacggcttcaggatagtcccctgcgatgtaaaacaacgtctgcttgag

SEQ ID NO: 2783 - DNA, 407 bp, Chlorella vulgaris
cgcacgcgtccacgctttacctacaccgtaggagacgcgattggggcaggggtgcaacctaccacctatctgtgcgacgatgacgtggcagcggggctgcggcgggtggctgcggcgctcagcgcgctgtccatgctccctgagcagcagcaggcacggcaggtacaggaagaccatgacgcagccctgggggagctggagcttgccattgacgagctggccagcgtggagggcctctgcttgcctgccccgcaagcggcaggcaccactagctgatgttgctgccagcagctgatgtttgagctcctagcagacctgccctggcgggccccttccaaggatcataagcatgggtggcaggtagcgtgaacacggtgtgacagttgagctgaacgtgcatgacggga

SEQ ID NO: 2784 - DNA, 412 bp, Chlorella vulgaris
  unsure (1)..(412): unsure at all n locations
ggtctagaattcccgggccgacccacgcgtccattgcctctgaggagcccttgtggcaggccgctgcagttgattgtgacccttatgtgtcagggcagccatcgggtgggtaagcatgtaggacgtgaaggccttgcatgccttgagttttgggcgccctgctagctgcacttggcctccctgcaattcttcttcctgtattcttgtaccaccttgtagccctgcaaaccagtaccagcatgctgctgttgctagagaagagaatctcaccattcttgtccgatggctaacttctgatcactgttgtgcaacatatatggtatcacgcgacgcacaggccatgtgctgcagttgcctcaacggctgcaccgcagtactgacctgngttctgtaagaactgctgttgcgaaaa

SEQ ID NO: 2785 - DNA, 439 bp, Chlorella vulgaris
cgggccgacccacgcgtccacccacgcgtccgcccacgcgtccgcagttgtgcaaaatggcgagcaaggtgtccggcgaggtgctgcgtgagggtatcgctggggtgctggagggctccaagtccaaggcccgcaagttcacggagaccgtggagctccagattggcctgaagaattatgacccccagaaggacaagcgtttcagcggctctgtgaagctgccttactgcccccgtccccacctgaaggtgtgcgtgctgggtgaccacaagcactgcgaggaggcccagaacgcgggcattgacgcgatgagcgtggatgacctcaagaagctgaacaagaacaagaagctggtcaagaagctggccaagcagtatgccgccttcctgtcctctgacagcgtgatcaagcagattccgcgtctgctgggcccggcctg

SEQ ID NO: 2786 - DNA, 472 bp, Chlorella vulgaris
  unsure (1)..(472): unsure at all n locations
taccggtccgaaattcncgggtccacccacgcgtccgtaactcttgctccaacctgctaagttcttatatagttggcaagatgactgctgctgctcgattcgtgtggctcagcggacgggctgagatatatccgctccttgctgttattggtctgggcctatccttgacaacttactcttgcggcaggcacttgtggactaacccagacttgcatgtgagcaaggcctaccgttcagctggccctgttgacgacaacggcgcggtgctggaacgtgccaaaggctatggcagcagcatcttcaaggacatgaagggcgagaaggggaccattttctaggtgcttccagccttcttacactttcccggctttgtctangaacgcctctcggaactatagttcatggatatataccagcagtagcgattgcttatttgcccggatgtatcctgtggccccattgtggaacctaa

SEQ ID NO: 2787 - DNA, 447 bp, Chlorella vulgaris
ttcccgggtccacccacgcgtccgcacacgcgtccggttgctggcgtcggagcggctggcaacatggcgaccgagattaagttgttcggcaagtggagcttcgatgaggtggaggtgaacgacatctcccttgaggactacattgccgtgaagcccaagtatgcgcgcttcaccccccactctgccggccgtttccagaagcgccgcttcaggaaggcgcagtgccccattgtcgagaggctgaccaactctctgatgatgcacgggcgcaacaacggcaagaagctgatggcggtacgcatcgtcaagcacacctttgacatcatcaacctgctcaccgaccagaaccccatccaggtcctggtggacgccatcatcaacggtggtccgcgtgaggatgcacccgcattggctcccccgtgtggtgcgccgccaggctgttgatgt

SEQ ID NO: 2788 - DNA, 453 bp, Chlorella vulgaris
tcccgggtccacccacgcgtccgaagcagaccctctctgcccgtttcggcgtccgcgcccctgtctcccggggcacccgccaggtgacccgcgcctccgtggagtggtacggccccgaccgcgccaagttcctgggccccttcaccaaccccccttcctacctgaagggtgagttcgctggcgactacggctgggacacctctggcctgtccgccgatcccgagaccttctcccgctacagggaggttgaggtgatccatgcccggtgggccatgcttggcgcccttggctgcgtcgtgcccgagctgctggaccgcaacggcaccgtcaactttggcgagaacgccgtgtggttcaaggccggtgccgccatcttcggcgatgacgggctgaactacctgggcaacccctccctcatccacgcacagtccatcgtggccgtgctgctctccc

SEQ ID NO: 2789 - DNA, 387 bp, Chlorella vulgaris
ttcccggggccacccacacgtccggagccaccaaagccgccagaatgcagaccaccttcgtgggcaccacccaggcgctgcgcgccaaggtctccacccaggccactcgtggctccaaggtagcaacctccatgcgccgcaccgtcaagtccaagaacgtgaagaccaccgacaccagccagtggtacggtcccgaccgccccaagttcctgggccccttctccgagggtgctgtgccttcctacctgaacggcgagttcgctggtgactacggctgggacaccgccggcctgtccgccgaccccgagaccttcaagcgctaccgccagattgaggtcatccatgcccgctgggccaagcttggcgccctgggctgcatcttgcccg

SEQ ID NO: 2790 - DNA, 74 bp, Chlorella vulgaris
ccaaaaggttcaaaaggttagttacccttgaaggcaaagtcatacctcttctaaaatgtcacctaatttcattt

SEQ ID NO: 2791 - DNA, 151 bp, Chlorella vulgaris
ttcccggggccacccacacgtccgcagacgcgtgggcggacgcgtgggcggacgcgtgggctgaaggcagcattttggattgtgattttgctgccagccgctgtcagagtgccttttgttgtaatggagcatgtgataagacttgtgagac

SEQ ID NO: 2792 - DNA, 423 bp, Chlorella vulgaris
ctgtgcgctcttgcatgcagggcacccacctgcccttgacagttcacaggttgccgacgggtcctgtacagctggagggcatcagcaactcggcgacgataatctacccagacatcgctgtttgtgaaggcatcgtgcatgctgtggacgccatcatcctcccagtgagagttcaagccatggatggagccagcccggggccagctggagagactggtggatgacagagcatgcatcactgccgcacaacggatgccatgactgaggaagacacatatgctgagtgacgtgctgctcttcagctgttgaaaggcactgcttctcagcaacctttcctgaagtggcacttcatgaaagccaccagcagccaacgcatgattggtcatgaacttgcagaatcttggattttgcagatgccctgcc

SEQ ID NO: 2793 - DNA, 454 bp, Chlorella vulgaris
ttcccgggtccacccacgcgtccgcagacgcgtgggtcgtggaatcccccgtcgacaacaggtccaaggttcacaagatgcagaccctctctgcccgtttcggcgtccgcgcccctgtctcccggggcacccgccaggtgacccgcgcctccgtggagtggtacggccccgaccgcgccaagttcctgggccccttcaccaaccccccttcctacctgaagggtgagttcgctggcgactacggctgggacacctctggcctgtccgccgatcccgagaccttctcccgctacagggaggttgaggtgatccatgcccggtgggccatgcttggcgcccttggctgcgtcgtgcccgagctgctggaccgcaacggcaccgtcaactttggcgagaacgccgtgtggttcaaaggccggtgccgcatcttcggcgatgacgggctgaactacct

SEQ ID NO: 2794 - DNA, 467 bp, Chlorella vulgaris
tcccgggtccacccaaacgtccgcatcccagcagcatgcccaagcgcaaacaggccagctcggactcccttctgcacgaagaagaggaggagcaggtttccaacgacagttttgtcagcgatacatccagctctggtcttagcgactcggagggtctttctggggacgatgacagcagcgaggatagcggggatgacgaaaacggcgaggctttcgacagtataaacgtggacttcgagttctacgacccacaggaaaaggactttcacggcctcaaggcgctactgcacacttacctagatggggaacagtacaactgctcagagctggtggaagcaataatagaacaggcggcggtgggaacagtcatcaagtgtggggaggacgatgatcccatcggagtgtgtacagtgttcaacttgaagcagcatagccacctcaagtctctcatagaactcaagagcttt

SEQ ID NO: 2795 - DNA, 350 bp, Chlorella vulgaris
ccacgcgtccgcacgtgcataagacctgccgccatgggtcgtatgcactccaagggcaagggcaagagccgctcggctctgccctacaagcggagcccgccctcttggctcaagatttccagccaggaggtgaacgagctcattggcaagtttgccaagaagggcctgaccccctcccagatcggtgtgctgctgcgtgacagccacggcgtggcccaggtcaagtctgtgaccggcagcaagatcctccgcatccttaagggccagggtttggctcctgagatccccgaggatctgtaccatctgatcaagaaggccgtgtccatgcgcaagcacggggaggggggggg

SEQ ID NO: 2796 - DNA, 349 bp, Chlorella vulgaris
gtcctaaattcccgggtccacccacgcgtccgcaaacgcgtccgacccaggcccactcccccaggcagaaacaagatggtggctctccagattctcgcagcgactgccaagggcaccgtcaagggtaccgttaagggtaccgcaaagcaggcagcgaagaccgtgaagaaggcggccatcaagaccgcaaagaaggtcgcccccaagaagggtggcgtggagtggtacggccccaacaggcccctgttcctgggcccctacagccccgagcccccgagccacctgaagggtgagttcgctggcgactacggctgggacacctccggcctgtccgccgattccgagacct

SEQ ID NO: 2797 - DNA, 400 bp, Chlorella vulgaris
gtcctacattcccgggtccacccacgcgtccgcacacgcgtccgcacggatccttgatcgtgctatcatgggtgtccaagtgcagactgtcactcctggcgatggggtcaacttccccaagaaggggcaaaaagtaacagtccactacacaggaacccttacaaatggcaagaagtttgactcctcccgggatcgcggccagccctttgatttcaccatcggtgtggggcaggtcatccggggctgggacgagggcgtggctcagatgagtgttggccagcgtgccaacctgctgatctccgccgactatggctatggggcccggggtgctggaggtgtgatcccgcccaacgctgccgcacagttcgacgtggagcttatcaagatcacctgagcaatg

SEQ ID NO: 2798 - DNA, 350 bp, Chlorella vulgaris
gtccgacattcccgggtccacccacgcgtccggaggaaggcagtgcatctgctgaggaccgaaacggacaaccatgcagattttctgcaaaacagacaggactcatgtccttgagcttagctccgaggccactgtggccgatgtcaaggctgccatcgaggccagccagggcatcccctgcgatgcgcagcgtgtgatgttctctggtcgccagctggaggaggaggcctccctggccgcctgcggcgtgtctgacgacagccagctgtacatcctgatgcgcctgctgggtggtgccaagaagcgcaagaagaagacctacaccaagcccaagaagcagaagcacaagc

SEQ ID NO: 2799 - DNA, 408 bp, Chlorella vulgaris
tcccgggtccacccaaacgtccgcacacgcgtccgcccacgcgtccgcggacgcgtgggaggtttcggagcgcttctccgccgctgcataagccggcgtgagcttgattagagggtgtcacccaccgtgcgcgctgcaacttgccaagctctggctggaagcagtgcccaagcggtaggagaggggcccacagcgcataacagctgacatgccgagtggcaagtagtgttttgttgttgtgggttgtggggagtgtactttgagttgtgaggctgtctgtatttgacagcccaccttctttggcgtgactttggttggccttgacagcatgccttggcgagtagccctccccagggagactcgagatacaggttgcatttggcgattgaggggaatgtgaccgtcttg

SEQ ID NO: 2800 - DNA, 440 bp, Chlorella vulgaris
  unsure (1)..(440): unsure at all n locations
taacggtcctacattcccgggtccacccacgcgtccgcaaggcgctgctcaacatcatctccaaccccgtcaactccactgtgcccatcgccgccgagacgctgaagaaggtcggggcctatgaccccaagcgcctctttggcgtgaccaccttggacgtggtccgggccaagaccttctatgcggagaaggctgggctggatgtggacaaggtggacatccctgtggtgggcggccacgcgggcgtcaccatccttccactcttctcacaggcggtccccaccgccaacaagctgtccgaggacgagattgtcgccctgaccaagcgcacccaggacggcggtaccgaggtggtgcaggccaaggcgggcaagggctctgccaccctgtctatggcctacgcgggcgcgctgttcgctgacgcgtgcctgncggggctg

SEQ ID NO: 2801 - DNA, 440 bp, Chlorella vulgaris
ttcccgggtccacccacgcgtccgtacacagtgcgcagcatcgctccacggacctccctttaccgacctcctgctcgagtggtgagaagtgtggctaggaaagttctggttcttcccctcatcgtgcgcgccatggcgagcagcagccgggatctgcagcttgacaaaaacactccagagaagacttggaaggagctcctctcagcccaggagtaccaagtgctgcgacagaagggcaccgagcctcccaacagtggcgaatataataatttctatgaagacgggctgtttgtctgtcgagcttgtggaaacccgctgtacacgtccgagaccaagttcaaaagtggttgtggctggccggcattccacgatcatatccccggatctgttgatcggcacgaggatgtcagcttcggtatgaagcgggtggagattacctg

SEQ ID NO: 2802 - DNA, 392 bp, Chlorella vulgaris
  unsure (1)..(392): unsure at all n locations
ttcccgggtccacccacgcgtccgaaccaggcctgtgatcgctgctaggtttgggtcccagcgcaagagcgaagggtgtggcttgccagacggggctgcaaaccccgaccgcgcggagctttagcctagggaacagctatgagtgacgaagtggtcaaccctacgattgaggctgaggangagtgcaagcctaagtgcatccggcactggattgagtaccaggagtgtgccaagcgtattgagagtgatgccacaggcgaggctcactgtactgggcagttttttgactactggcactgcatanacaagtgtgcggcccccaaggtcttctccaagctcaagtgagccgcgcagctggtttactgtggagggccgcgcattggtggagctgc

SEQ ID NO: 2803 - DNA, 340 bp, Chlorella vulgaris
ttcccggggccacccacgcgtccggatgattgcggccctgtgcgccgagcatagcgtcaacctcattgccgtgcccgaccccatgaccctgggccagtgggcaggcctgtgcaagattgacagcgagggcgaggcgcgcaaggtggtcggctgctcgtgcgccgtggtcaccgactacggcgaggagactgagggcctggcggtgctgcaggagtacctgaagagccgctgagcgcatgctgtgctgggcatgcagtgcacccgcccagggcacgcgctgtgagcgctgtgctgggcagtgcactggcatctccggcgtgtaaattgcgccggctggctg

SEQ ID NO: 2804 - DNA, 368 bp, Chlorella vulgaris
gtcctacattcccgggtccacccacgcgtccgcacacgcgtccgcccacgcgtccggcgagccgtaccctggtcacccccctggaagccataggatgtgctttggcatgtgctttgtggcaatagtcgagctggtagggcacccaggcaatgtgtgcgcgccttgtggttacgtgtacttggctttgcttgtagtacctgtttgccagcagttctggctctgtagggttggtgtgtttgggaggcccacatggtgtgcactgtgatgccaagagcgggcgcttctggtattattcatggttgctgcgtgattttcgggggtcaggtggtgggttttggcgagtatgcaagcggttcagccccccaaaa

SEQ ID NO: 2805 - DNA, 346 bp, Chlorella vulgaris
gtcctgcattcccgggtccacccacgcgtccgcagacgcgtgggcggaggtcaggcagtgaattgactcgctcctaacatgtagcaggtgggcgggcaggcgttccagcaggagggctgggggagccagcctgctgggggagggagggagccccctcgccttgggctccccacgtgaggggaggacgttgcccgccatggggatccccagggacccatacatttagcatgggtgtggcatgggtggcaggtagtgcaagcaggaagtgagagctgggctggactgacagggctgcattcaggttgagcctgaaatttacccacaagaaccttggcagggatggagc

SEQ ID NO: 2806 - DNA, 461 bp, Chlorella vulgaris
gtcccacattcccgggtcgacccaaacgtccgcatctgcccgtttcggcgtccgcgcccctgtctcccggggcacccgccaggtgacccgcgcctccgtggagtggtacggccccgaccgcgccaagttcctgggccccttcaccaaccccccttcctacctgaagggtgagttcgctggcgactacggctgggacacctctggcctgtccgccgatcccgagaccttctcccgctacagggaggttgaggtgatccatgcccggtgggccatgcttggcgcccttggctgcgtcgtgcccgagctgctggaccgcaacggcaccgtcaactttggcgagaacgccgtgtggttcaaggccggtgccgccatcttcggcgatgacgggctgaactacctgggcaacccctccctcatccacgcacagtccatcctgggcgtactgctctcccagattgtgc

SEQ ID NO: 2807 - DNA, 238 bp, Chlorella vulgaris
gtgcatatctctcattttttttgcccatgttagaggaaattacaagctccctagaaccccgcgacaactgtaaccgggttcagtttcaggcccacgctactccaatggaagcatgctggtttgcagcggtgcaggcacccaatgcgccaagcgcttactcgaacacggatgaacccatgtcctcatcatcgtcctcctctaacttctcatcgtccttggcagctggggcggcatcagc

SEQ ID NO: 2808 - DNA, 450 bp, Chlorella vulgaris
attcccgggtccacccacgcgtccgatgtaaccgaaagagtcaaaggcagacacaccatgcaggtgcaagccctcttcaagaagcttggcggcggtgcccccgctaaggcagccaagaaggccgccggtgcagccaagaaggccgttggcaacgccaagaaggtcgcctctggcaccaccaagggtggctggctgggcactgacagcaacaacatcgacctggacaggtggtacggccctgaccgcgccctgtacctgcccggtggcctgctggaccgctctgaggtgcccagctacctgaacggcagcctgcccggcgactatggctacgacccccttggtctgggcaaggatggcggcctggagaagtaccgcgccaacgagctgctgcacgcccgctgggccatgcttgccgctgctggcgccatcatccctgagggccttgccgcc

SEQ ID NO: 2809 - DNA, 400 bp, Chlorella vulgaris
ttcccgggtccacccacgcgtccgcacacgcgtccgcccacgcgtccgtatggcaatgagaaggggctcctggccggcctcaaggtcaagaacctcaagacaggggaggtgactgacgtgcctgtgagcggcctattctttgccatcggccacgagcccgccaccaagttccttgacggccagataaacctggatgaggatggctacatcgccactgtccccggcagcacggccaccaacataccgggcgtgtttgctgcgggcgacgtgcaggacaagaagtggcgccaagccatcacagcggcaggctcaggttgcatggcggcattggaggtggagcggttccttggcgagcatggagaggcctgactcagcatgccaaggctgccccagtcaaggc

SEQ ID NO: 2810 - DNA, 334 bp, Chlorella vulgaris
ttcccgggtccacccacgcgtccgcaccaacatggcgaaggacaagtctcgctccgccgaggtggtgacccgcgagtataccattaacctgcacaagaggctgcatggcataaccttcaagaagagggctcctaaggccatcaaggagattaagaagtttgcccagcatcaaatgaagaccagcgacgtgcgcgtggacgtcaagctgaacaaggccgtgtggagccaaggcatcaagaacgtgcccaaccgcctgcccattgtgatccagcgcaagcgcaactaggacgacgacgacaaagaggagatgttctccctgatcaccctgtccgag

SEQ ID NO: 2811 - DNA, 342 bp, Chlorella vulgaris
ggtcctacattcccgggtccacccacgcgtccggttaagcatctagctgagcctagtgtttgggtatgggtctgaggttttgtgcgggtcaccgccatgggtttgacaggttatgcccgactgtggtgcaccgatgtatattatgacgcggtaatatgttggcagactgactggtcttgcttagcctgggtgtctttgatttcgctgggggcagtgattgtcaaggggttgtgttgccagggttccctgtgattctgacctgcctgcatggaaacgctgtgctggtgaagctgcttccgataacagcatatgcctccgaagttttgctttgcacgggctgta

SEQ ID NO: 2812 - DNA, 374 bp, Chlorella vulgaris
ccgggtccacccacgcgtccgatcagatctacgccatccgccaggccatcgccaaggcgctagtggccttctaccagaagtacgtggatgagcagagcaagaacgagatcaaggacatcctgctgcagtacgacaggacactgctggtcgccgatcctcgccgctctgagcccaagaagtttggcggtcatggtgcccgcgctcgcttccagaagtcttaccgttaaaactctgggcggctgtcgcctgggagctggcaaagtggaggctgcgtgtgccagcgccgagggatagtgggggagtgctgggtgtgccgatgtggctcctctcttagatacaagttaccggccccatgtaacatgcccagtttgcac

SEQ ID NO: 2813 - DNA, 410 bp, Chlorella vulgaris
  unsure (1)..(410): unsure at all n locations
cgcctgtccgtacggctccgagnattccaggtccacccacgcgtccgcatggcacctcccagccctgccgctgctgtagccccagctccgtccggcagcaggcgtctgcttttctagggaagcctcagcacatatattgagcccacgctggtctgcagctggctgttacaagctcgggggcgccatgggcctatggcataggttaggcaaacaggtgtcaagcttgcatgatgctggcatgtatggttacatggatagatgactagtattggctaggagcaagatttgtcatctgcgcttgtcactgagattggctagccacagataggtggcgtcagtaggccgagggttttgctttgtgcgtggcaacatatgctcaccataaggctangctaattgctgagcccaac

SEQ ID NO: 2814 - DNA, 436 bp, Chlorella vulgaris
cccacgcgtccgcacacgcgtccgcggacgcgtgggcggacgcgtgggttcaagggcaagcgcgtcgtcgtcctgcggcagctgccctccggcctgctgctggtgaccgggcccttcaagctcaacggcgtgcccctgcgccgcgtgaaccaggcttacgtcatcgccacctccaccaaggtggacgtcagcggcgtggacgccgacaagtttgacgatgcctacttcaagtctgctgagaagaagcagcgcaagcagggcgagaaggagttctttgctgaggccccggccaagaaggagctgccggccgagtatgtcgagaaccagaagtctgtggactccaagctgctgtcggcgctcagtgacgagctcaagggctacctctctacccgcttcacactgcgcgccagcgacaggccccatctccttaagttct

SEQ ID NO: 2815 - DNA, 413 bp, Chlorella vulgaris
taacggtcctacattcccgggtccacccacgcgtccgcacacgcgtccgcccacgcgtccgcggacgcgtggggggcactgcctgcttcgtggagttacctcccaaggagcaggaccaaccatggagctcacacagcgtgaggcggacgtgcagatgctgctggcggcatcgtgccacctggggaccaagaactgcactgcccagatggagcgctacgtgtaccgccgccgcagtgacggcatctatgtgttcaacctggcgcgcacctgggagaagctgcagctggcggcgcgcatcattgtcgccattgagaacccccaggacatcatcgccatctccgcccgcccatatggccagcgcgccgtgctcaagtttgcgcactactctggcgccaaggctaccgtgggccgcc

SEQ ID NO: 2816 - DNA, 335 bp, Chlorella vulgaris
  unsure (1)..(335): unsure at all n locations
tccacccacgcgtccgcttacaggtagtgagagtgccaccaaagccgccagaatgcagaccaccttcgtgggcaccacccaggcgctgcgcgccaaggtctccacccangccactcgtggctccaaggtancaacctccatgcgccgcaccgtcaagtccaagaacgtgaagaccaccgacaccagccagtggtacggtcccgaccgccccaagttcctgggccccttctccgagggtgctgtgccttcctacctgaacggcgagttccctggtgactacggctgggacaccgccggcctgtccgccgaccccgagaccttcaagcgctacgcca

SEQ ID NO: 2817 - DNA, 232 bp, Chlorella vulgaris
aaggggatccaccctaaagtatccatgcatacaacgtcataactctactacagagtcacccaaattcagttcacgaggcccactttttagaacgtcgttatagaaaaacccctggggtaaaccaccttaatcaccttgcataacatccccctttcacaaccccgtttaataaccaagaggcccacacaaatggcccttcccaatagttcttcacaccaattgccaaaccgaa

SEQ ID NO: 2818 - DNA, 337 bp, Chlorella vulgaris
ccggggccacccacacgtccgcaaacgcgtccggcgattcgaactaacgcctatccgaggcttcctcgaagacagaagacatcaacatgtctgacggaggggacatcccgaaggccgccgaggcccccgccgccgccgcggctcccgcccccggcgagcccatggacatcaacaccgccatccagctggtgctcaagaacgcgctggctcacgacggcctcgcacgcggtctgcacgatgcctgcagggccattgaccgcggccaggcgcatctgtgcatcctcgccaacgattgcaaccagcccgactacaagaagctgatttaggccctgtgcgc

SEQ ID NO: 2819 - DNA, 461 bp, Chlorella vulgaris
gtcccaaattcccgggtccacccacgcgtccggacggtgggaagggcttgtcttccgcaagccaaaatgccgtccataggcttttaccgcaactatggcaagaccttcaagaagccccggcgccccttcgagaaggagcggctggatgccgagctgaagaccgtgggcgagtacggcctgcgcaacaagcgcgagctctggcgtgtgcagatggtgctgtccaagctgcgctccagggcccggtccctgctgaccctggacgagaaggaccccaagcgcctttttgagggtgaggccctcatgcgccgcatgtaccgctacggcttcctggacgagacccagaacaagctcgattacgtgctggcgctcaaccctaccgacgtgctggagcgccgcctgcagaccctggtgttcaagctgggccttgccaagagcatccaccacgcgcgcgtgctcatccg

SEQ ID NO: 2820 - DNA, 394 bp, Chlorella vulgaris
  unsure (1)..(394): unsure at all n locations
cgcctgtccgtacggctccgagnattccaggtccacccacgcgtccgcagacgcgtgggtgcacggagcaggcgctgtgctggcccggcggcgagagcgccgacctgctggtcgacgacggcggcgacgccacgctgctcattcacgagggcgtgaaggccgaggatgagtacgccaagaacggcaccctgcccgacccctcctccaccgacaaccccgagttcaagattgtgctgggcctcatccgcgacggcctcaagggagacccgctcaagtggcaccgcatggctgagaagattgtgggcgtgtctgaggagacgaccacgggcgtgaagcgcctgtacgagatgaccgccaacggcaccctgctcttccccgcggggggggggaacgg

SEQ ID NO: 2821 - DNA, 327 bp, Chlorella vulgaris
ccacgcgtccggatgatccccgtctcgcaatagttccagggcaatcactatgcaggcaaccatgatgaagaccttcggcgccagcctgcgcaaggctgtgcccacccaaggcaagggcacccgccaagtgacccgcgcctccgtggagtggtacggccctgacagggccaagttcctgggccccttctctgagggctccacccccagctacctgaagggcgagttcgccggcgactacggctgggacactgctggtctgtctgccgatccccaaaccttcgctgcctaccgcgaggttgaggtcatccatgcccgctgggccatgct

SEQ ID NO: 2822 - DNA, 176 bp, Chlorella vulgaris
acgcctgtccgtaccgcgtcgtagattccaggtccacccacgcgtccggaccagctggggttctaacagaagacatgctagatgcttgactaggcaccttgaggactggtgcgctgggccatgctgcactatttgatgggcccttatgcgaccctgtaaccttaaggcatgtaaaa

SEQ ID NO: 2823 - DNA, 293 bp, Chlorella vulgaris
ccgggtccacccaaacgtccggaagggcccgcctgtacagccagacacgatgacaaagaagaggaggaactcgggtcgcaacaagcacggccgtgggcatgtgaccacgcgtgcgcagcgaatcctctggcgtgctggtccctaaggacaatgccatcaagcgcttaattgtcaggaacatcatggatgcttcagctagccgtgatatacaatacgcttgtgctaatgatgggtaaacactggctaagatataacgtaacgtgtattactgtatcaatgcatctatccactcc

SEQ ID NO: 2824 - DNA, 334 bp, Chlorella vulgaris
ttcccgggtccacccacgcgtccgcacacgcgtccgaagctgcgctcgctggtgcgcaagtggcagacgctgattgaggcgcacgtggacgtcaagaccaccgacggctacttcctgcgcctgttctgcatctccttcaccaagaagaggcccggccaggtgaagaacactgcgtatgcgcagagcagccagatccgccagatccgcaagaagatggttgacatcatgactcgcgaggcgaccagctgctacctgaacgagctggtgggcaagttcatccccgaggccatcagcatggacattgataagtcgtgccacggtatctaaccgctgc

SEQ ID NO: 2825 - DNA, 461 bp, Chlorella vulgaris
  unsure (1)..(461): unsure at all n locations
ttcccgggtccacccacgcgtccgtaaatcacttgatatctgtaggtgggcggatgccaagctggaagggcctcccctaatgccaagtgatgggagccttcggcaagaggtcgaccagctgctcgggggggtggacagctgtgtctcagcgggcctgaacttgctggctggccgctctggcaggtactggggcatcggcagcggccagtcagcctctcagcgcgccgcgtttgaggcgcagttgtccaacttacaggcagcgctgcagcggcatggaggacctttcctggcaggacctcaccccaccctcgctgacatcgcctactacccgttcatccggcgttttggtgtcggcatggagcgctttgctgggtacgacgtgaccactgtgcttgggggcagcgtgggacgctggctggatgccatggggcacagggaatcttgcanggtgtcctccgctg

SEQ ID NO: 2826 - DNA, 453 bp, Chlorella vulgaris
ggtcgcaaattccgggtccacccacgcgtccgcacacgcgtccggtttgtctgtcgagcttgtggaaacccgctgtacacgtccgagaccaagttcaaaagtggttgtggctggccggcattctacgatcatatccccggatctgttgatcggcacgaggatgtcagcttcggtatgaagcgggtggagattacctgcgccaagtgcggcggccatcttggccatgtctttgagggcgagggcttcccaacacccactgaccagcggcactgtgtgaacagtatctctgtcaagttcgtcccaaaggctcaagaatgatgggcctcggccgatgatgagagggggtcagtggagttctgctgcgacctgaccatggccgcctctgcctcacattggctatctgacgttcgtgtgacgttctgttacaaaccccgggctaatccttgatattgt

SEQ ID NO: 2827 - DNA, 73 bp, Chlorella vulgaris
ccaaaaggatccaaccttacttacccgtgaatgcgacgtcaaacctcttctatagtgtcccctaaattcaatt

SEQ ID NO: 2828 - DNA, 313 bp, Chlorella vulgaris
ttcccgggtccacccacacgtccgcaaacgcgtccgcccacgcgtccgcccacgcgtccggggctacagggagcataacataatggggattgacctcaaggccgggggccgcaacaagcgggtccacaggaccgcccccaagagcgacaacccctatctcaagctgctcgtgaagctgtaccggttcctggtgcgccggaccgactctgacttcaacaaggtcgtcctcaagcgcctcttcatgtccaagaccaacaggccgcccctgtccctctccaagcttgccaagttcatggtcggcaaggatgacaag

SEQ ID NO: 2829 - DNA, 340 bp, Chlorella vulgaris
gggtccacccacacgtccgcacacgcgtccggacggctccttcgtgctcatccttccccaaccaactgcagcagcgccaacaccatggccgacaacaaggagcctcgcttcctcatctacggtggccgcaagggctggatttccggcctggtgggcgagctgctggaggcccagggtgccacttaccactttggcaaggcccgcattgaggaccgccacgccgtgctagaggacatcaaggagttcaagcccacccacatcctgaacgccgctggtgttactggccgccccaacgtggactggtgcgagacccataagattgagactatcaggtggaggg

SEQ ID NO: 2830 - DNA, 316 bp, Chlorella vulgaris
aggtcctacattcccggggccacccacgcgtccgcaaacgcgtccgcccacgcgtccggccaccaaagccgccagaatgcagaccaccttcgtgggcaccacccaggcgctgcgcgccaaggtctccacccaggccactcgtggctccaaggtagcaacctccatgcgccgcaccgtcaagtccaagaacgtgaagaccaccgacaccagccagtggtacggtcccgaccgccccaagttcctgggccccttctccgagggtgctgtgacttccaacctgaacggcgatttcgctggtgactacggctgggacacc

SEQ ID NO: 2831 - DNA, 339 bp, Chlorella vulgaris
gttcccgggtccacccacacgtccggatttaagcgccgcagtggtcacctcgctgcctcggatcgcctttgctgcacgtcgagtagccccactccccagccctcctaggcgcttgatggccacccaagccgctggcaaggaggtggttagtactgacaaagcacctgcagcagttgggccttactcccaagcaatcaaggccaatgggatggtcttcatttctggccaagtcccactcgtgcctgggaccaagaactttgctggtgacgatatcaagacacaaacggaacaggtcatgaccaacatcggcgctatccttgaggcagctggcacttcttg

SEQ ID NO: 2832 - DNA, 466 bp, Chlorella vulgaris
ttcccgggtccacccacacgtccgcacaaattcttcaaggctatagactgggtgcagggggaaaacaatgtgtacaggaagtggcccacggagtttttctacaaggaggatgcgcccaagggtcacttgccactgaccaatgccttgcggggcacccggctatttgaggcaatccttgagcaccctgcagtggtagagcagctggccgcttccaaaggcagcagcgcgactcccgactggatgaagtgagcacaccggggctggctgatcggaggggagacaggggagacagtgtgtccggcttctgtagtggtgggttgtagctaaaaggcgtgggggccatcctgctggacgcgacttgacctgccggaatactataggcgtggtctacgtccgttcccgtgcgatggaatactgggccagtgtatttgtatgggtgctctcaagctttgcagaaccatctaag

SEQ ID NO: 2833 - DNA, 365 bp, Chlorella vulgaris
ttccaggtcgacccaggcgtccgaatcaacatcactcattcgcaaggttatctctggttgttagttgatggctcacttagccgcattcaacatgtcggcaagggtgcagcccagcctgccccgcgccgggaccaaagcatgccaggcaaacctggctctgccgccggcggcactacgggtcagccccttccagggcagtgccaacgtgctgcgcgtcaggcgtgcggcaggcagccaccgcggctcttgcaggccggcggctgtggtgccccaggcatctataacctacaaagaaccaaataccggggtggagttcccactagtgcagcaattctggctgggtgagccggcggggggcggggggg

SEQ ID NO: 2834 - DNA, 372 bp, Chlorella vulgaris
ggtccgtgtattcccggggccacccacgcgtccgcaaacgcgtccgcgctccatcctccgcctgcaccgtgacaagctgcccccgccgatgcgcgccatgggcgacgcctacgtcaaggacgagtttagcaagcacctgcgaggcaagaccacggaagggcagtggcaggtgttcatgcaagagtggcagcgctaccatgccatgctgtcaggtaatgccgacatcctggctgacccggcggcagccgctgcggcacggcaggcacgggccagctctggcggcagcagcagcagcggcggcgggcatggcatgggtgcacaaggccctgcgggtgaactttccgccgcaaccaagaggggaggggggggggg

SEQ ID NO: 2835 - DNA, 288 bp, Chlorella vulgaris
ccgggtccacccacgcgtccgaaaaaaaaacaaaaaacaaaaaaaaaaaaaaaaaaaaaaaaaacagcaaaaaaaaaaaaaacacaaaagccaaaacaaaaaaacaaagacaacaataacaaggggccaacggcgcaagacgacccaagcaaagcacccccgaacacgcacaacgggcccggcaaacaggccacgaacccacggaacacggcccgccggacaccaccggcgggccagaaaaccgccagccatacaccaagaaacccctgctgcatcacaccctttttc

SEQ ID NO: 2836 - DNA, 335 bp, Chlorella vulgaris
cccgggtccacccacgcgtccggtgatccccgtctcgcaatagttccagggcaatcactatgcaggcaaccatgatgaagaccttcggcgccagcctgcgcaaggctgtgcccacccagggcaagggcacccgccaggtgacccgcgcctccgtggagtggtacggccctgacagggccaagttcctgggccccttctctgagggctccacccccagctacctgaagggcgagttcgccggcgactacggctgggacactgctggtctgtctgccgatccccaaaccttcgctgcctaccgcgaggttgaggtcatccatgcccgctgggccatg

SEQ ID NO: 2837 - DNA, 407 bp, Chlorella vulgaris
  unsure (1)..(407): unsure at all n locations
cggtcctacattcacgggtccacccacgcgtccgcaaattgcactggatgttcggctgttgtttgtaacggggatcaaacaggcagggtcagccccaactcacgcaggatgaagaaaaagcagcagttactgggctatcaagccttgccgacgcgatctgtatctcctccggtcaaccaaaacagctggctttctaggagagggagcgggcccacacagcctgccgacccccagcagcagccgcagcagccacaagcccagccacagcaggcttcccagcgacggcctgcaagagtagccattacaaaaccgatagctcctgggcagcctgggacgcaagggcggagtanggagcgtttcatctccttgccagatgaactacatggggaacggcagcaccccgccag

SEQ ID NO: 2838 - DNA, 427 bp, Chlorella vulgaris
attcacgggtccacccacgcgtccggatcacacttggagagatggagtgcatgggcgcctgcgtaaatgcaccgatgatcgcaattgcagactacaccaagggggttgagggcttctcctacacgtactacgaggacctgacccccgaggacacccttggcatcatagagaccatcaagaagggtggcaagcccaagcccgggtcgcagcatcgcaacaaggctgagcctgctggggcggtggccaacggcaagtgggttgccagcaagcctggcgccgacggcatcacactgactggcgagccccgcggaccctactgcagaaatctggacgagccggagccagcgcccatcaaccccgcagcagcgggcgcagcaccgccgccgccgccccccaccccggccgccgggcacggctgctgccaaag

SEQ ID NO: 2839 - DNA, 143 bp, Chlorella vulgaris
  unsure (1)..(143): unsure at all n locations
accggtcctgatntcccgggtcgacccaaggcttcgaccacggcttcggccaacgcttccgcggacccttgggaaaataaaaacataaattaaaattgaataaaacttcaaaactactcgaaaagtgtaactgaaattcaatt

SEQ ID NO: 2840 - DNA, 408 bp, Chlorella vulgaris
accggtcaagagtcccggggtggacccacgcgtccacgaatagtcatatagtattgggttcttgatatatcgtatcgctgagcaacagggtgtgcttctctcaccgtcccccttataacataagcgtgcccaaggacgctttagcggagatagtgtcgttggtgcagcacgctcacgtagcacgccctcgacggctgtcagctgatcagggcgtgctgctccgcgagctgaaggaacgccgatgacagaatatggcagctgagggatagcctgcttgagtaaaacagtaggtgaagggtctggaagttagacggctcacaagggaggaggcatgaagcatagatcggggggatctcacttggcacctggcacttgcagcacccttatgggcatcccgttgccgacctg

SEQ ID NO: 2841 - DNA, 299 bp, Chlorella vulgaris
ggccgacccacgcatccacccttgctcacgatctttgaggggtagaggtgttaagcgccagcgcacgcttgccccatggcttcgtcttggcgggcacggtagagtgagcctcataaaaaccagcaagtgatagcccaccacacagtagagcgcaaataaaactcaacgttacgcctcttctaagcggtcagacataagcaaaggtctgcgtcccacaagtatgagtgaggaacagttgatcaggatgtcgggctctgatgaccagcagcggggccagggatctcgcattcaggacaacc

SEQ ID NO: 2842 - DNA, 449 bp, Chlorella vulgaris
attcacgggtccacccacgcgtccgcagccctccctgcagcgttggattaaggctgtgcaaggatggggtcgctcgttgccaacgagaactttacgcatatcctgcgtgtgctcaacaccaacgttgatggcaagcagaagattatgtacgccctgaccgccatcaggggtattggccgccgcttttccaacatctgctgcaagaaggctgaggttgacctgaacaagagggccggtgagctgagccccgaggagctggagagcatcatgaccattgtggccaacccccgcgcctacaaggtgcccgactggttcctcaacaggcagaaggacatccgcgatggccgcttcagccagacgacctcatctgccctggacaccaagttgcgtgacgacctggagcgccttaagaagatcagggaacaccgcggcctgcgccactattgggg

SEQ ID NO: 2843 - DNA, 433 bp, Chlorella vulgaris
ttcacgggtccacccacgcgtccgcagaattctaccttggcaagaagattgccttcatctacaaggccaagaccgagaagaagggcagcctttatcgcgtgatctggggcaaggtcacccgtgcccacggcagcaccggcactgtccgcgccaagttcaggaagaacctgccacccagctccctgggcgccaaggttcgcgtcatgctctaccccagccgtatctagtggactgaagcggcgccgccagctggcgggcagcatgcacggcagcagtggcgatgcgcggcagctgtgccggagcaaactggagtgagggacgggccccgcgcactggcaggggcaggtgcttcggtgggctgtagcaagctcagcacagcacagcatggcgcagcagccgtgctatgtgtggtgactgtgcatggagcggggac

SEQ ID NO: 2844 - DNA, 107 bp, Chlorella vulgaris
accggtcccatgttcccgggtccacccaagccttcgataggaatttggaaggtccttaacccaaggttggggggttcctaaccccggaggcagttggatttgaattg

SEQ ID NO: 2845 - DNA, 215 bp, Chlorella vulgaris
caagccttcgaggaaactgaaggtcgccggttcaatccctgccgccccggacttaaagccggccactttaggtcaaccctgtacttcgtacttggctccaaagggggagtttgcgaccctagttgttaactagagatgttgtgcctctagttggttctcctccacctatctacagcgtctcgcttcagaggtcgccgtgggacaggtttccaaaa

SEQ ID NO: 2846 - DNA, 375 bp, Chlorella vulgaris
aattcgcgggtcgacccacgcatccgcccacgcgtccggtggctcccaaggatggtgtggccagagggcccgtcagccatggtgcatttgacgaccttgcacaccagcggtccaggccggcaggtgcttccggcgcccctggctgctctgccggcgctggaggacctgcggctctacaacaggagggtcacagcgctgccagaccagctggcgtgcgccggtgcactgagaaggctggatgcttgtgggggtgggttagaacaggtgccggcagtgctgggcggcggggcagcctgccagctagcgcacttatcgctgtcgggaaataaactactgacggtctcaagtgaggggctggaagtgctgcgctcgctg

SEQ ID NO: 2847 - DNA, 387 bp, Chlorella vulgaris
  unsure (1)..(387): unsure at all n locations
cccacgcgtccgctctgacagcggcaactttggctttggcatcaatgagcacattgacctgggcatcaagtacgacccctccaccggcatctagggcatggacttctacgtggtgctggagcgccccggctaccgcgttgccaagcgccgtgccaagctctccaaggtgggcgtgcagcaccgcgtgactaaggatgatgccatcaagtggttccagacccgctttgagggcatcgtgctcaacaaggccgttgccaaccagtaacctgcctactcagcatgccggcatgctttggccgctttggtatgcaaagtagctggttgccggtaccgcaatggtancggggccttgtggcataatcaagagatgtaaaagagtgacacgtc

SEQ ID NO: 2848 - DNA, 437 bp, Chlorella vulgaris
tcacgggtcgacgcacgcgtccggctgcttaggcgttcttggcaccatggctgagaagtcatgcacgatcaggacacgaaagttcatgaccaaccgcctgctgcagcggaggcagtttatccttgatgtgctgcaccctggccgtgccaatgtctccaagactgagctgcgcgagaagctgtccaagatgtacgacgtcaaggactccaactgcgtgtttgtctttggcctgaagacccagtttggtggcggcaagtccacagggtttggcctcatctacgacaacgtccagggggccaagcagttcgagcccaagtacaggctcatcaggaacggtctggcgcagccggtgcagaagtcgcgcaagcagcagaaggagcgcaagaaccgcaccaagaccatccgcggtgtcaagaagaacgcagtggccggcaaga

SEQ ID NO: 2849 - DNA, 449 bp, Chlorella vulgaris
attcacgggtcgaccgacgcgtccgcacacgcgtccgcccacgcgtccggttggtggaagggggagagccgcaaaaatggcgtcggacaagaaggctcagaaccccatgcgcgagatccgcgtcgcaaagctcatcctcaactgctgcaccggcgagtctggtgatcgcctgcagaaggcggcaaaggtgcttgagcagctgaccgggcagcagcctgtgtttggcaaggcccgctacaccgttcgccagtgggccatccgccgtaacgagaagatctcctgccacgtcaccgtgcgcggggagaaggccgtgcagctgctggaggccgggctcaaggttcgggagtacgagctgcttcgtcgcaacttctctgacagcggcaactttggctttggcatcaatgagcacattgacctgggcatcaagtacgacccctccaccgggatct

SEQ ID NO: 2850 - DNA, 397 bp, Chlorella vulgaris
ggtcgacgacgcgtccggacgcctatagtgagctgcaccccggtccctatttgctggggttgctgtggcggagcagggagcgccgtgcggaggcagagtcggggtgctgtctttgcctgccgcgtggcatctcgtgtcgcagcagtggcagtagcggttgtggtctggtggggctaggggctggtaggcctgctgggggcccgcgcatgcgtgcactgctgctgctgcgcacagactgtgtaacacactaaacccgggaaaaaaaaaaaaaaaaaaaaaaaaaaaaaaaaaaaaaaaaaaaaaaaaaaaaaaaaaaaaaaaaaaaaaaaaaaaaaaaaaaaaaaaaaaaaaaaaaaaaaaaaaaaaaaaaaaaaaaaaaaaaaaagggggggccccc

SEQ ID NO: 2851 - DNA, 441 bp, Chlorella vulgaris
ttcacgggtccacccacgcgtccgaaatccaggacaaggagggtatcccacccgaccagcagcgcctgatcttcgctgggaagcagctggaggacgggcgcaccctggccgactacaacatccagaaggagtctacgctgcacctggtgctgcgcctgcgcggcggcatgcagatctttgttaagaccctgaccggcaagaccatcacactggaggtggagtcgtcagacaccattgagaatgtgaaggccaagatccaggataaggagggcatcccccccgaccagcagcgcctgatcttcgctggcaagcagctggaggacgggcgcaccctggccgactacaacatccagaaggagtccacgctgcacctggtgctgcgcctgcgcggcggcatgcagatttttgtgaagaccctgactggcaagaccatcacgcttg

SEQ ID NO: 2852 - DNA, 379 bp, Chlorella vulgaris
  unsure (1)..(379): unsure at all n locations
taccggtctgatntcccgggtcgacccaagccttcgacgaccccttggcccctttacaacccaacacccgcaaattggcggattcggtgcaaaccttcgggcccagaaaaaatgcattggctttgggttactgcaaccgtagaaaggggaagctgaggttcattgggtcacctctggactgtatcaagcctgacaccatgcttctacagtgtgatgtaccctgtgcagctccttggcattcagtggtttgccaaattcaatatgctcaaccgcttcataggctgatgacatgtatctcatatatatgccatccgccatgccatcgacaatgcgctaatagccttctaccagccctacttggatgaccagggctcgaccc

SEQ ID NO: 2853 - DNA, 391 bp, Chlorella vulgaris
acgcgtccaggaccctctgtaaccgaaagagtcaaaggcagacacaccatgcaggtgcaagccctcttcaagaagcttggcggcggtgcccccgctaaggcagccaagaaggccgccggtgcagccaagaaggccgttggcaacgccaagaaggtcgcctctggcaccaccaagggtggctggctgggcactgacagcaacaacatcgacctggacaggtggtacggccctgaccgcgccctgtacctgcccggtggcctgctggaccgctctgaggtgcccagctacctgaacggcagcctgcccggcgactatggctacgacccccttggtctgggcaaggatggcggcctggagaagtaccgcgccaacgagctgctgcacgcccgct

SEQ ID NO: 2854 - DNA, 438 bp, Chlorella vulgaris
ggtaccggactagaattcgcgggccgacccacgcgtccacccacgcgtccggatccggcaaggaagcaagatgccgatccagggcgggcacaagtaccaccagtatcaggtggtgggacgccaccttcccacggagagggagccggagcctaccgtgtaccgcatgaagctctgggccagcgaccctgtcagggccaagagcaagttctggtacttcctgaggaagctgcgccgggtcaagaaggccaatggccagatcctggcatgcaacgagatctttgagaagcaccctaccacggtgaagaactacggcatctgggtgcggtaccagtcgcggactgggtaccacaatgcgtacaaggagtaccgcgacaccaccctcaacggcgccgtgtcgcagctgtatcaggagatgggctcccgccaccgggtgcgcca

SEQ ID NO: 2855 - DNA, 407 bp, Chlorella vulgaris
gtaccggactaggaattcgcgggccgacccacgcgtccacactgatatcaagaaatctgaggattccacatacagccatgaactgcgtcatgctcgtccagcaagtaacccatcggcagcaagtgaaggcagttgctacccagcagtgcctgaagaagaccaggtgcttcacatctcggtgtgcacctcggaatctgcgggttagcgctgagccagatcaagccgccaagatggaagccatgcaggaggcgttgaagaacccagaggtcgctgcccggatgaaagctatggaggaaagcatgaagaaccccgcaatgcaagatcagatgtcgcaaatgatgtctgtgatgcagaaccctagctttgttgcaagaatgcaagagctgcgggaggacccagagcttaag

SEQ ID NO: 2856 - DNA, 408 bp, Chlorella vulgaris
  unsure (1)..(408): unsure at all n locations
ggtaccggaccagaattcccgggccgacccacgcgtcaaggaaggcagtgcatctgctgaggaccgaaacggacaaccatgcagattttctgcaaaacagacaggactcatgtccttgagcttagctccgaggccactgtggccgatgtcaaggctgccatcgaggccagccagggcatcccctgcgatgcgcagcgtgtgatgttctctggtcgccagctggaggaggaggcctccctggccgcctgcggcgtgtctgacgacagccagctgtacatcctgatgcgcctgctgggtggtgccaagaagcgcaagaagaagacctacaccaagcccaagaagcagaagcacaagcacaagaagatcaagctcagggtgctcaagttctacaaggtanacgacagcggc

SEQ ID NO: 2857 - DNA, 407 bp, Chlorella vulgaris
cgcgtccaccaacgcgtccggtgcgtgcagcacctctctggtggaatgtgggtctactggggtgaacctctacgggtatgatttggtggatctggcccttggcggtgaaaaggactgacgtgctggggtgtgatgtcatggctcgctggttgcccgtcggcggtatgtggcctgtcacagcgtgggccacaacattgtgtttgaaactaatttgcctcgagtcttgttgagaaccctctgtttcctcagttatgtgagttgcttgcgcgttggtaagaaagttgtaagtttgctaactgttgtggggggtaaggctgggctgcctggggcctgtccttggatcgtcaggagctgcgcagcaagtgactgcttacagaaatcactagacgcactgtgtcactgtcctg

SEQ ID NO: 2858 - DNA, 276 bp, Chlorella vulgaris
ccccaaaagtttcaaactttagttaggcataaatccaatttaaaaccccttaaaaattttccccaaaattcaattaatgggccttcgttttaaaacttcttaagtggaaaaaccttggttttcccaaatttaaccccttttaaaaaaatccccttttcccaacttgggttaaaaataaaaagcccccaaccttttgcctttccaaaaattttcccacccaaattggaaaatggaaccccccctttactgggcaattaaccccggcgtttttggggg

SEQ ID NO: 2859 - DNA, 281 bp, Chlorella vulgaris
ttttgcccgccctgttgttacacgtcaagcactataccaatgctgcctatcaaatatacaaacaagggaatgtgttcttctcaggaggaactaaaggccgtcgccgctgtacaaaagctcagatgttgttggtagccttcagccccagcacgatgccgacgccaatagcatggccaaaggcgcccagagcaagcacatcagtggcagtgaggccggcggggtccttggtccccaggctcacggacttgtcctcgtaaagcttgacagaagaagtggtcctg

SEQ ID NO: 2860 - DNA, 274 bp, Chlorella vulgaris
acggacgcgtgggggtttcagagaagcaaccccttggtacctaaccatctggtagggcctagtatcgaaccggctgggtgttagccgaaagtgttgggctggaatggtgttaaggtgttggcccaggcatggattgccttaggatgctggtccgccagaggttgtctgtttgctgggcgtaagcctgtggagtgctggctccagacagaggtcgtaatcaccatggtctgcaaaaatggtgcaaccctcatgtgcacctgcaaaaatggtgcac

SEQ ID NO: 2861 - DNA, 412 bp, Chlorella vulgaris
aggtaccggaccagaattcccgggccgacccacgcgtccacccacgcgtccgcccacgcgtccgcccacgcgtccgcccacgcgtccggggtggagagagcacgatacaatgaagttctctacccgcgtcagctcctccaggcggaagtgccgcaaggcacacttctcggcgccctccagcgtccgcaggtcgcttatgagcgctcccctctccggcgagctgcgcaacaagcacggggtgcgctctgtgcccatccgcaaagacgacgaggtgaccgtcgtccgcggtacctacaagggccgtgagggcaaggttgtgcaggtgtaccgcaagaagtgggtcatccatattgagcggatcacacgcgagaaggttaacggcgcaaccgtgaatgtgggtgtcgacccctcc

SEQ ID NO: 2862 - DNA, 387 bp, Chlorella vulgaris
  unsure (1)..(387): unsure at all n locations
accggtcttcatttcccgggtccccncaagcgtccgaggaaattccaaggtgtgccaaaggaagggttggcccaaccgacccggcaaggttggggtatccaacccaccaggcaacctgcggttgcaaaagcgcaccccgctcaaaaaaattggcccaagccattgggatctgaccgtggcggaacacttgcagccaggcgaaacttaccggcaaggtgcggtgcgggggctccaggaggagctgggggtcagcgtgagcgaggcggcactggagggcccgctggctcccacgcacaagcgcgagctacaccagggagacttccatgacgtggagctggtgcagtcgttcaggttggtcaatttcacaggaaatttgtctctggacat

SEQ ID NO: 2863 - DNA, 444 bp, Chlorella vulgaris
ttcacgggtccacccacgcgtccgcacacgcgtccgccttgctagctttacttgcctctgcacgaagaatatggctaccttcgcagaggctcctgcaggcgacgccgctaagggcgccaagatcttcaagaccaagtgcgcacagtgccatactgctgcccctggcgagggccataagcagggccccaacctaggcgggctcttcaaccgccagtcgggccaggcggaggggttcagctatagcaaggccaacaaggagaaggcggtgcactggaatgaggagacgctgtatgagtacctgctgaaccccaagaagtacatcccaggcaccaagatggtgtttgctggcctgaagaagcccgaggagcgcgctgatctcatcgcttacatgaaggaggcgtgcaagtagatagcctagtagctgaactaccatagcccaggaca

SEQ ID NO: 2864 - DNA, 424 bp, Chlorella vulgaris
ttcacgggtcgaccgacgcgtccgggaaggcagtgcatctgctgaggaccgaaacggacaaccatgcagattttctgcaaaacagacaggactcatgtccttgagcttagctccgaggccactgtggccgatgtcaaggctgccatcgaggccagccagggcatcccctgcgatgcgcagcgtgtgatgttctctggtcgccagctggaggaggaggcctccctggccgcctgcggcgtgtctgacgacagccagctgtacatcctgatgcgcctgctgggtggtgccaagaagcgcaagaagaagacctacaccaagcccaagaagcagaagcacaagcacaagaagatcaagctcagggtgctcaagttctacaaggtagacgacagcggcaaggtgcagcgcctgcgcaaggtttgccccc

SEQ ID NO: 2865 - DNA, 386 bp, Chlorella vulgaris
caacccttcgaccaacgcgtccgcccacgcgtccgcgcccttggctgcgtcgtgcccgagctgctggaccgcaacggcaccgtcaactttggcgagaacgccgtgtggttcaaggccggtgccgccatcttcggcgatgacgggctgaactacctgggcaacccctccctcatccacgcacagtccatcgtggccgtgctgctctcccagattgtgctcatgggcctggttgagggctaccgcgtgaacggcggccccgctggcgagggccttgacaccctgtaccccggcgaggcctttgaccccctgtgcctggccgacgaccccgacagcttcgctgagctcaaggtcaacgagatcaagaacggccgcctggccatggtgtc

SEQ ID NO: 2866 - DNA, 400 bp, Chlorella vulgaris
ggtaccggaccagaattctcgggccgacccacgcgtccacccacgcgtccgcggacgcgtgggtggctatgttctccatgttcggcttcttcatccaggcacttgtgaccggcaagtctcccctggagaacctggccgaccacctggctgaccccgcctccaacaacggcttctccatcctgaccgccaccaagttcaccccctgaattcagccctgaattttgagggaaatcccctggctgctgctagttcctcgttgttctagctcttggttggttgccggtgtgtcgctgttgtgtgaaggggagaggcgtgaccccttggttgtctactggcagcagcagcagcacccagcagctggacggtcgtactgagatgtgtgtgacgcggcaaaattcgt

SEQ ID NO: 2867 - DNA, 283 bp, Chlorella vulgaris
ggtaccgatccagaattccgggccgacccacgcgtccacccacgcgtccggtgccacaggtagtgcccgctggggccagcgcggcaagtggagcaggccgggcggcccgcagcaaaattaattcctgttggcaaccgttcctgggggaatttcaaggccttgaaaatccaaaaaaagttcgaaccaacaagaatgctgccgaaaacctaaatcaattccgaattcaaccttgtttggcaatttgtttggttacagcgctctcctgtttgtggttctcaaccaa

SEQ ID NO: 2868 - DNA, 394 bp, Chlorella vulgaris
aattcgcgggtcgacccacgcgatccgctgtctttgctggcgagaactggcgccacattgcctactgagcagacgctgtgcatctcgcttctgaagtctcgcgcttggtcagcctgctgcccgggttgttgggaccagggcccaattgatgctgatgctgctgatggtgttggtgttggttggcggggctcacagcgaagaccctggaacattgcatgcttttccgacaggtcccgccaggggacacgtggcattgcttgtgagtgctggcgcgcgcgtggcaggacagtggaactgttttttgcggggtggcgggtaccgtactgccggggtgtggatgttgtacctacgtagaaacaagctgcggggcatccttttgtgcactttgggcctc

SEQ ID NO: 2869 - DNA, 302 bp, Chlorella vulgaris
cccgggtcgacccaagccttcgaccaagtcttcggccctcaatggcgctcggtgtcttcatcgcagcgccgctggtcaccttctgcctgtcggtggtcacccaaactcccaacccgctcagctccccggacgtagctgcttggtacggcatggcttcaggggcactgtggcaggctggcaacgcttgcagcattgtggctgtccaagacccacgtgtgggcctggccgttgcctaaccaattatgcaatgcgccctcctcctccccggtgcctggggcaaactgttgtttaaggagctgaaa

SEQ ID NO: 2870 - DNA, 412 bp, Chlorella vulgaris
cccacgcgtccgcacacgcatccgcggacgcgtgggcggacgcgtgggtgtgagcagcaggggggctgccacaatgaaacagctagtctcttcccgcaccatcgacatcccttcgggggtggagattgaagtcaaggcgcgtaaggcaccctgacccgcgacttcaagcacctggcggtggacatgttcctgtccgaggaggagggcgtgaagaagcttaacgtggactgccactttggcaagcgcaaaagcctggcagctatccgcacagccacctcccacgtgcagaacctgatcactggcgtgaccaagggctacgagtacaagatgcgcctggtgtatgcccatttccccatcaacatcaacatcgacgatggaggcaaggtcatcgagatccgcaacttcctgggag

SEQ ID NO: 2871 - DNA, 367 bp, Chlorella vulgaris
aattcgcgggccgacccacgcgaccacccacgcgtccggcctctccaaggtggtcaagcgcggcggccccatggccctctaccagggcttcggcgtgtccgtgcagggcatcattgtgtaccgcggcgcctactttgggctgtacgataccgccaagggcgtgctgttcaaggacgagcgtaccgccaacttctttgccaagtgggccgtggctcaggctgtcaccgcgggtgccggcgtgctctcttaccccttcgacaccgtccgccgtcgcctcatgatgcagtctggcggcgagaggcagtacaatggcaccattgactgctggcgcaaggtggcccagcaggagggcatgaaggcgttcttc

SEQ ID NO: 2872 - DNA, 445 bp, Chlorella vulgaris
ttcacgggtccacccacgcgtccggagcttccttgctggctggctaggggggtctagatcacaagggtgccctatcgcttgaaccgtggtcagcatgttgtcgaggctccggtccgcccaggccctggctaagctcgccaggacctatgccactgaggctggcgccgttgaggctaagaagggcggcggaggcttcaagctgctactggcgctgactggtgcagccggtgggctgtactatgccaaggagaagggcctgctggatggcgtgaccggcgtccctgcgcccctcaagcagcaggaggacttcaagcctgactacgacgctgtgcgtgctgccatctccgacctgctggactccaacccagactacgacgatggcagctacggccccatacttgtgaggctggcatggcacacctcgggggacctacgacaggaacac

SEQ ID NO: 2873 - DNA, 405 bp, Chlorella vulgaris
  unsure (1)..(405): unsure at all n locations
cccgggtccacncaagccttcgagacaaaaccaaggcatttacccaccggctaaaaaccgacaacagggcgggcttaaaggggcctgatttcacccggccggtcgtcatcggtgacaatttctgggtcggaggtggcgccattatctgccctgggattaccattggtgaggggtgtaccatcgcagcaggggcggtggttacagcggatgtggagcctttcacactggtgggcggcaaccctgccaggctcattcggcgcctggagcgaagcaatgccggggcaaaggcacatgcgcatgaagcggggcctgccggggcagcacgggggtgaccacagcaggagacggtgcttaggaaacaatgttgggttgcagaggttctaggccgctgcattgggttggctg

SEQ ID NO: 2874 - DNA, 415 bp, Chlorella vulgaris
ttcacgggtccaccgacgcgtccgcagcaagaaggcagtcatcgtgaagaactacgatgacggcagcagcagccggccttacggccatgctattgttgtgggccttgccaaggagccccgcaaggtgatcaaaaagtcgtctcagaagacccaggcccgccgcagcagcctcaagacctttgtcaaggccgtgaactaccagcacatgatgcccacccgttacaccctggatgtggagctcaagggcgttgtctcagctgacgtgcttgacaactccaccaagaaggaggaggcacgcaaggcagccaagggcctgtttgaggagaagttcaagagcggcaagaacaggtggttcttctccaagcttcgtttctgaggagctgcatcagtgaggcagcctccctgccaagcctgt

SEQ ID NO: 2875 - DNA, 419 bp, Chlorella vulgaris
acgcctgtcggtaccggtcctacattcacgggtccacccacgcgtccgcattgctaggtttgtcttgagcttcgcccgacaaaatgtcgagccaacttgtgtgggagcttgtgaagcacaacaacgcattccttgtgaagggcgtgaacggcaccgtgttcagccgggaggctggtaacctgtataaccgcaactcctacaagtattctggcctggccaacttcaactccactgtggatgttgctgcggctaaggatggcggggtgcaggtgtccaagtcccgtggcaagaacgccagcaagcccagcgctgcccgtgctgtgtctgtaatcaagaagaacgctcgccgcaccaactacgctgtcggcgctgaggcgcagcgcgtgcgccccgacctcaagaaggctgccgtttgccgt

SEQ ID NO: 2876 - DNA, 357 bp, Chlorella vulgaris
caaggcttcgagaatcatatcggaacaaaccgtcaacatgccgaagacggtcgtggttgattgccggggccatatgcttggccggctggcgagcatcctcgccaagcagctgctcagcgggcataatgttgtctgcgtgcgctgcgacgagatcaacatctctggcggcatggtcatgcacaatatggagtatgagcgcttcctgaacaagcgcatggttaccaaccccaggagggctgcctacaggttcagggcacccgcccgcatcctgtggatgactgtccgcggcatgatccctcagaataccccccgcggcgcagcagccctggaccgcctcaaggcctttgatggtgtgcc

SEQ ID NO: 2877 - DNA, 398 bp, Chlorella vulgaris
ggtaccggactagaattcgcgggccgacccacgcgtccagcccgctgggccatgcttggcgcgctgggctgcgtcgtgcccgagctgcttgaccagaccaaccacgtgccctggttcaaggctggcgcccagatctttgcccccgagggcatccagtacctgggtgtggatggcctgatcaatgccaagagcattgtggccaccctcattgtccaggttgtgctcatgtcctttgtggagggctaccgcatcaacggcggccccgcgggcactggcctggacgccgtgtaccccggcgaatcctttgaccccctgggcctggctgacgaccccgacaacttcgccgagctgcgggtgaaggagatcaagaacggccgcctggccatggtctccatgct

SEQ ID NO: 2878 - DNA, 354 bp, Chlorella vulgaris
ggccgacccacgcgatccagtgcaaaatggcgagcaaggtgtccggcgaggtgctgcgtgagggtatcgctggggtgctggagggctccaagtccaaggcccgcaagttcacggagaccgtggagctccagattggcctgaagaattatgacccccagaaggacaagcgtttcagcggctctgtgaagctgccttactgcccccgtccccacctgaaggtgtgcgtgctgggtgaccacaagcactgcgaggaggcccagaacgcgggcattgacgcgatgagcgtggatgacctcaagaagctgaacaagaacaagaagctggtcaagaagctggccaagcagtatgccgcct

SEQ ID NO: 2879 - DNA, 304 bp, Chlorella vulgaris
gattcctgcctgttcaaggctgacgttatctcctacctcccattttgcacatgcaaccacacaggtcgtccaaaacctcaaaaccaatcctgctctgtcttctcaagggcagtgtccgggaaaattgcccaaacaatcgcaatagttgtcccaggaactgagacaagacaagtgcagggtatgggtcgcccagcctccaccagtaaggggacacgtcaaggtcagccaagctctctgactgtccctctctcgcggcctgctgacagttttgaaacaccagccataccactgaactgctgctctc

SEQ ID NO: 2880 - DNA, 392 bp, Chlorella vulgaris
aggtaccagtcaggaattcccgggccgacccacgcgtcaaagaagaagaggtggtttgaggagcaggacaaggagctggacttttaccttgtgtctcagcctgcgtggctggagtccaagtttcccgaggaggccaagcgcgtgagcaagcctgctgtggccctcgtttccaccgaccccacctggatcctgttcatgaagctgcgcctggaccgcgtcctgaagctggaccttggcaagatgagcctggacgaggtgaccaagtctaacggccccgtcaccgagctgaagcctcaggagaagtggattgccccttaccagccgtacgcacatggctggtggaatgtgtttgagcgcaagtgaagcgcccttgcctgccgagtgcgtgtgtt

SEQ ID NO: 2881 - DNA, 444 bp, Chlorella vulgaris
cccgggtccacccacgcgtccgccttaaacacgattggttatggactgtgtggtgctgggagcgagttgagtttactcctcctgtgtgcactggggctccctaatcccaatccccatgtgcactggttggacgggttttgggagtttcccgtctgacacccatgcaccccagccccagatcgaaccccggccgatatactagctgggcggcttggagttaaggcgcccaagttgaggattcaagcctccatatccatgaaagcgagggctagcgagccatgtgatgaaggggtggcggccagctagcagcgctcgagtggtgcatgccattaaaccggttactgtcagtgtgtcaatcctagctgtgatttcaagactcaaggtcgttccattgtggtagaatccagtggttcagcctgcagcaaacggtagtgagtgcctgcc

SEQ ID NO: 2882 - DNA, 371 bp, Chlorella vulgaris
ttttgttgtcactgattacacacagtggcaaaacattatcaccggtacttgatgtgcacctttcgatccacagctgcaaggtcacaatgtaagtcacatgtaatgtctgccggtgcctgcagcctgactagtggtgctactgcacgttcccttgcacttagcaagacttttttgtggggactcacagcagcaaagccagtgcggctttgtgatgttggaccaggccggatagcgctgcatcagtgctctgttctgcgtagcttgggcgtctggaaaccaccgagcagcgaacccattagccctgcccggccgccctggcctctccctctgccccttggctccccattgtcccgtcctctaacggcaaccct

SEQ ID NO: 2883 - DNA, 414 bp, Chlorella vulgaris
ggtaccagtcaggaattcccgggccgacccacgcgtccacggacgcgtgggcggacgcgtggggcattgctaggtttgtcttgagcttcgcccgacaaaatgtcgagccaacttgtgtgggagcttgtgaagcacaacaacgcattccttgtgaagggcgtgaacggcaccgtgttcagccgggaggctggtaacctgtataaccgcaactcctacaagtattctggcctggccaacttcaactccactgtggatgttgctgcggctaaggatggcggggtgcaggtgtccaagtcccgtggcaagaacgccagcaagcccagcgctgcccgtgctgtgtctgtaatcaagaagaacgctcgccgcaccaactacgctgtccgcgctgaggcgcagcgcgtgcgccccgaactc

SEQ ID NO: 2884 - DNA, 355 bp, Chlorella vulgaris
  unsure (1)..(355): unsure at all n locations
cggtctagatatcccgggtcgacccacgcttcaacggacccttgggcaagggtgctgtgccttccaacctgaacggcaatttccctggtgacaacggctggaacaccgccggcctttcggccaaccccaaaaccttcaaccgcaaccgccaaattgaggtcatccatgcccgctgggccatgcttggcgccctgngctgcatcttgcncgaggtcctgcagangtacagcggcatcgagttcggcgaggctgtgtggttcaaggctggcgctcagatcttctctgacgacggcctgaactacctgngcaaccctgccctcatccacgcccagtccatcattgccaacctcatcac

SEQ ID NO: 2885 - DNA, 76 bp, Chlorella vulgaris
ccaaaaggttccaaccttagttaggcatgaatccaaggtaagagctcttcaatattgtcacctagattcaattcaa

SEQ ID NO: 2886 - DNA, 403 bp, Chlorella vulgaris
aggtaccagtcaggaattcccgggccgacccacgcgtcagggtgatccccgtctcgcaatagttccagggcaatcactatgcaggcaaccatgatgaagaccttcggcgccagcctgcgcaaggctgtgcccacccagggcaagggcacccgccaggtgacccgcgcctccgtggagtggtacggccctgacagggccaagttcctgggccccttctctgagggctccacccccagctacctgaagggcgagttcgccggcgactacggctgggacactgctggtctgtctgccgatccccaaaccttcgctgcctaccgcgaggttgaggtcatccatgcccgctgggccatgcttggcgccctgggctgcctgacccccgagctgctgcagaacgccggcg

SEQ ID NO: 2887 - DNA, 420 bp, Chlorella vulgaris
ggtaccagtcaggaattcccgggccgacccacgcgtccacccacgcgtccgcccacgcgtccgcccacgcgtccgcggacgcgtggggtggaatcccccgtcgacaacaggtccaaggttcacaagatgcagaccctctctgcccgtttcggcgtccgcgcccctgtctcccggggcacccgccaggtgacccgcgcctccgtggagtggtacggccccgaccgcgccaagttcctgggccccttcaccaaccccccttcctacctgaagggtgagttcgctggcgactacggctgggacacctctggcctgtccgccgatcccgagaccttctcccgctacagggaggttgaggtgatccatgcccggtgggccatgcttggcgcccttggctgcgtcctgcccgaactgctggaccgc

SEQ ID NO: 2888 - DNA, 319 bp, Chlorella vulgaris
acccacgcatccgatgacgcgtgggcggacgcgtgggcggacgcatgggcggaggcgtgggtgggtggagagagcacgacacagtgagtttctctacccgcgtcaactcctccagtcggaggtacggcaaggcagatttctcggcgccctcgagcatccgcagcgtcgcttagcagcgctcccctctcgggcgagctgctcagcaggcacagagtgcgcgctgtgcgaagccgcaaaggagatgaggggaccgtcctctgcggtacctagatcggccgtcagggcaaggttgtgcaagctgtccgcacggatgtgggtc

SEQ ID NO: 2889 - DNA, 441 bp, Chlorella vulgaris
ccgggtcgacccacgcatccgctggccgctggtttccacgtcgtgacctgaggtagcttgctgtagacgcttcatatccagccatgccttgggagggcgtccaggtgcctcaggatcccccaaattataaccctgaggacaaatatgccgacccggtgctctacttccagcaccgcgaggctgccacagcagaggagcttgtgaaagttgccgaggcaaagttgatcaggaacaagctgaagaagtgctacagggagtcgggcgtaaactacttgcaagactgccggcagctagcggagcagtacttggaggcgattaagggtgttggggtgtaccgctcaaactctgggcccaatgacaagcccaagtgggaggcttttggcgtcaggagaaactgagcagcttctgggcgccagcacagagtgcagcagcggagcacag

SEQ ID NO: 2890 - DNA, 393 bp, Chlorella vulgaris
gcagtgcgggggagacgtcgcacgggcatcacgtcgagggcagcaccgtgggtgccatctggcgctgctgcttgccttgaccaaggcaggttgacgtttgcttgccaggtggaggagggcggccatcctctggacttcctgtcagtgccccagctattggtcctccgcagtccctgtttctgattccacgagaagactttccaagtttctattgtgccctaaagtgctagcactgcgccctgaaatttcgttgaactgccacggaggcatcttgcctctgcaacaatcacttttgtagtcagagtgccaatgggctgggaggttcagcacactcggggggacgcgctagtcagtcataaaataattgaggcggtaaattgaagccatcaaaaa

SEQ ID NO: 2891 - DNA, 432 bp, Chlorella vulgaris
gggccgacccacgcgtccagcctgttcaattggaccttcactagtgtgtttcgttgatgctgcaccgcgtcacggaagcatggcctcctgcccgccacgctggccgtgccctgccgcctggcaccgaacatggtctgcacagagaacacattcaggtggacttgtgcggtggcggcccgctgtgatgcgcatgacgaaagcaatgccgccacctttagttgccggtacagcaggcctcactgactgctgctaactgccggtattgcccgctgtgcatttaagcgcagtctggccgccgtctcttctccgttgtaatcgtcaatgtgtggacttgttgaaaccgcctgcggcttgcccacatttgaattgacatcctttggtatgctctttggtactcattgcagtaccagctatggtaactttcctaacatg

SEQ ID NO: 2892 - DNA, 313 bp, Chlorella vulgaris
gggccgacccacgcgtccacccacgcgtccgaaaaacaaaaaacaaaagggtctacaacaaagaagacacatctcaatcaaagaggggcagcctcactaaaggttccaagcttatgtagccttacaagcgagatcgtaacatttccatagtggccacaagttaattcaatggccatcgatttacaagttcacaacaggtaaaacgcaggcgtcacccatattaatcgcattgcataagatccccctttcaccagcaggcgtctcatcgaaaaggccctcaacgatagcccttccaacaatttgcgcgacctga

SEQ ID NO: 2893 - DNA, 454 bp, Chlorella vulgaris
cctgcaggtacaggtccagaatgcccgggtcgacccacgcatccgcccacgcgtccgcaacttcattagccgtgcggtggacgtacgggctgtcgcgaaccgagtccgaggcggtgcgctccaagagcctgtctgttcgcctgcctgtaaggccggttgtttaaggtcgggcacttctaaagaacgtcgagcagccatgcttgcctccgccttcgctggtgccaagctgggcagcacgcccttccaggggcagcagctgctggcacagaggtcctcgctgcgtgcagcccctgcaccattcagtgtggaggctgcccacaaaaagggtgctggatccacgaagaacggccgtgattccaacagcaagcgccgcggcgtcaaggtgtatggcgggcagcccatccccgccggcggcatcatcatcaggcaactgggcactagggtgcatcccggg

SEQ ID NO: 2894 - DNA, 346 bp, Chlorella vulgaris
gagaagaagcgcatcgaggacttcatcgtgaacgttggcgccggtggcggcgctgcccctgctgcgggcggtgctgcacctgctgccggcggtgccgctgatgccgcccccgccgccaaggaggaggagaaggttgaggaggaggaggaggaggacatgggcttctccctgttcgactaagcgcctgacgctttgggtgtctgcaccgctgcaaaccagcatgcttccctggagtagcctgggccggaaacagaagccgcttacagctgtcgcggggttctagggagcttgtaacttcctctcacatgggcaaaaaaaaaaacaaaaaagcataaaagaataaaag

SEQ ID NO: 2895 - DNA, 73 bp, Chlorella vulgaris
ccaaaaggatcaaaccttacctacccttgaatgcaacttcaaacctctccaaaagtgtcaccaaaattcaatc

SEQ ID NO: 2896 - DNA, 288 bp, Chlorella vulgaris
ggtaccagtcaagaattcccgggccgacccacgcgtccacccacgcgtccgcccacgcgtccgggctggcactcatctcagtagttgttgctgtggaggaacagcctgaagtatctgtcgagtgccgagtcaagcactgtttcttccctttccctgctgctgctgttggactgccctccacacgctcccatgttgacttgacctgtcattggcgtacatgtgcctaggttaagagcggtcaggattgtgagaaactgaacatggtacattgttgagtccgcagccagc

SEQ ID NO: 2897 - DNA, 430 bp, Chlorella vulgaris
  unsure (1)..(430): unsure at all n locations
ggtactagtaaagaattcccgggccgacccacgcgtccacccacgcgtccgcggacgcgtgggggggtgtgtgccacatcttcgcgtccttcaatgacacctttgtgcacgtgactgacctgtccggcaaggagaccctggtgcgcgtgactggcggcatgaaggtcaaggccgaccgtgacgagtcctccccctacgctgccatgcttgccgcccaggacgtggccgctcgctgcaaggagctgggtgtgaacgctctgcacatcaagctgcgcgccactggcggcaaccgcaccaagacccccggcccaggcgcccagtccgccctgcgtgcgctggcccgctctggcctcaagattggccgtatcgaggatgtgnaccccatccccaccgactctacccgccgcaagggtggtcgccgcggtcgccg

SEQ ID NO: 2898 - DNA, 437 bp, Chlorella vulgaris
attcccgggtccacccacgcgtccggtcgacatgttcttctaccgcgagccggaggaggccaaggaggagggagccgcggaggaggcacccgccgtggagtacgcgcccgataccggcttccaggcagcgctgccaggtgctgaggagggctatgatgcgtacggctacaatgccgcgggcgaggctgccactggcttcgccaccggcttcgagccggcaaccggctttgatgccgcgcccgcccccggcggctttgaggcggctgctgcccccgctgcgcccgtggagtacgctgcccagcccgcgcaggatttcggtgctcagttctgagcagagtgagggttgcaggcagggatgtaggctgctgccgcagcacgtgtctcgctggataggtgggcttctgcggcccgctttggaacagcgcacagcatggata

SEQ ID NO: 2899 - DNA, 418 bp, Chlorella vulgaris
cgggccgacccacgcgtccacccacgcgtccggcctgacctcccatctcgtgcggctttcgcctttgaagccggcagcaggtcaccatgggtcgcgtcaggaccaagaccgtcaagaaggcttctcgtgtcattatcgagaagtactataaccgtctcaccatggactttgacaccaacaagaggatttgcgaggaggtggccattattcagtccaagcgcctgaggaacaaaattgctggcttcaccacgcatctgatgaagcgcatccagcgcggcccagtgcgcggcatctccctcaagctgcaggaggaggagcgtgagcgtcgcatggactacatccctgacgagtcggccatccagaccgacgcgattgaggttgacaaggacaccctggagatgctccgcggcatgaacat

SEQ ID NO: 2900 - DNA, 406 bp, Chlorella vulgaris
ggtaccagtcaggaattcccgggccgacccacgcgtccacccacgcgtccggcgaccgtaagatctccgtcaaggagagctggaggcgccccaagggtattgactcgcgggtgcgcaggaagttcaagggatgcggcgtgaatatgcctaacatcggctatggcaccaacaagaagaccaggcacctcctgcccaacggcttctacaagtttgttgtgagcaacgtgaaggacctggagctgctgatgatgcacaaccgcaagtactgcgccgagatcgcgcacaacgtgtccaccctcaagcgcaaggcgattgtggagcgcgccggggagctgaatgtcaagctcaccaatgccggcagcaggctgcgtagccaggaggacgagtagccgcctgggcctcagca

SEQ ID NO: 2901 - DNA, 394 bp, Chlorella vulgaris
ggtaccagtcaggaattcccgggccgacccacgcgtccacggacgcgtgggcggacgcgtgggggaatcccccgtcgacaacaggtccaaggttcacaagatgcagaccctctctgcccgtttcggcgtccgcgcccctgtctcccggggcacccgccaggtgacccgcgcctccgtggagtggtacggccccgaccgcgccaagttcctgggccccttcaccaaccccccttcctacctgaagggtgagttcgctggcgactacggctgggacacctctggcctgtccgccgatcccgagaccttctcccgctacagggaggttgaggtgatccatgcccggtgggccatgcttggcgcccttggctgcgtcgtgcccgagctgctggaccgc

SEQ ID NO: 2902 - DNA, 413 bp, Chlorella vulgaris
ggtattagtcaggaatgcccgggccgacccacgcgtcaggtggattgcacgttttcatacttaagcgagcagggaaggcagcacgtcatggtcggcacggtaggcagatactgtgtgccaagtcagggggcaccgccttgtcttgtgcgagcgaggctactaagagcaggagcgatacagaagggatggaaggaggcgtctacagtaacacgatcgccaagtgtgcgccagccacatctaaggagaaaactcgtggcacctgtgaaggcagcaagtggtgctggcagcagggttccaaagtcagggacggaagagctgcccatcttccccttgtccatagtggccctgccgtgtgccgacgtcccgctgcaaatttttgaggcacgataccgcgtactttttaccacactgct

SEQ ID NO: 2903 - DNA, 439 bp, Chlorella vulgaris
attcccgggtcgacccacgcatccgcccacgcgtccgcccacgcgtccgcccacgcgtccgcggacgcgtggggcagattttcgtcaagaccctcacgggcaagactatcacccttgaggtggagtcttcggacactattgagaatgtgaaggctaagattcaggacaaggagggcatcccccctgaccagcagcgtctgatcttcgccggcaagcagctggaggacgggcgtaccctggccgactacaacatccagaaggagtccactctgcacctggtgctgcgcctgcgcggcggcatcatcgagccctccctgcagatcctggcccgcaagtacaaccaggacaagatgatctgccgcaagtgctatgcccgcctgcacccccgcgctgtgaactgccgcaagaagaagtgcggccactccaaacagctgcgccc

SEQ ID NO: 2904 - DNA, 365 bp, Chlorella vulgaris
gggccgacccacgcgtccagtcatcatcctagcatttggcttcaagatctttgagcagtggccggtcatgcggcggcatgccccggagatcctgggggccacgtcagcaagcgctgcattctcagtgttcagcacagccgcgctgtgccggctgctggccatgccaccagatgttgcccgatcaatggtgccccgctcagtgaccatggccctaacactgcccatctctgagcaactggaggcccctcaggcaatcaccgcagctgccgttgtgctcacgggcatcgtgggagccaactttgtgcataccgtgctcaacgccctgcgcttcagggaatccatagccagacggctggctgctgctg

SEQ ID NO: 2905 - DNA, 398 bp, Chlorella vulgaris
  unsure (1)..(398): unsure at all n locations
cgggccgacccacgcgtccagacaagtacgtggcagaggcgtctcggtgcgtggcggttctgagccgctaccgtccttctctacatgcagcgttgcgcaaggtacagtagtttggtgcaggtgcagtgagctagagtaagatttctgtacgctgtaggcaatttgttaatagaagctgtgcccgtgattgatgactaatgcgcatcctccctcagagcctcttcctttttctgcctccactccanacgtaatgtatgttgccgtggcagcgccttaaaggctactgctggagaatgtaccatcgttttcccttttgcatctgaacacggagatgtagtgtattgatgtagtagatatccccttagcatagccagatgcaagcgggcagctgacgtttg

SEQ ID NO: 2906 - DNA, 411 bp, Chlorella vulgaris
gggccgacccacgcgtccacgcattagcagccgacagccgcacaatatggcggagtcggtgcagaccttcgggcgcaagaagaatgcagtggctgtggcctactgcaagcgtggaaagggggagctgaggctcaatggctcccctctggaccttatccagcctgacaccatgcgctacaaggtgctggagcctgtgctgctcctgggcaagcagcggtttgccaacgtggacatccgcatccgcgtcaagggcggcggccatgtgtctcagatctacgccatccgccaggccatcgccaaggcgctagtggccttctaccagaagtacgtggatgagcagagcaagaacgagatcaaggacatcctgctgcagtacgacaggacactgctggtcgccgattctcgccgctc

SEQ ID NO: 2907 - DNA, 299 bp, Chlorella vulgaris
aattcccgggccgacccacgcgtccacccacgcgtccgagtggagggatcagtggatgcccctacactagctttcatgccgcatgcgctgccagccttgcccatcatggtgctagggttgattttgggagagggcagataactggtggagcacgaactctcggtgccagcagtgacagccatgctggtctcgatcgccgcctttgggctgggcatcgtgtcactcctgctcatctcagacgggctgccccgcgaggcgcgggccgctctggccgcaaccccaccgctaagcactgctgt

SEQ ID NO: 2908 - DNA, 406 bp, Chlorella vulgaris
aattcccgggccgacccacgcgtcaggtgccacccatcttgcgctggtagcagcaagctcggcaggatggtgcggatttcggtgctgggcgatgccctgaagactctctacaatgctgagaagcgcggaaagaagcaggtgctgcttcgcccatcctccaaggtggtcatcaagttcctccaggtcatgatgaagcatggctacattggtgagtttgagtttgtggacaaccaccgctctggcaagatcgtggtggagctcaacggcaggctgaacaagtgcggcgtgatctctcctcgctacgatatctctgctgttgagattgaggactggattggtcgcctgctgccctctcgccagtttggctacttcattctgaccacctcccagggcatcatggaccacg

SEQ ID NO: 2909 - DNA, 385 bp, Chlorella vulgaris
ggtaccagtaaggaattcccgggccgacccacgcgtcaacccacgcgtccggtggaatcccccgtcgacaacaggtccaaggttcacaagatgcagaccctctctgcccgtttcggcgtccgcgcccctgtctcccggggcacccgccaggtgacccgcgcctccgtggagtggtacggccccgaccgcgccaagttcctgggccccttcaccaaccccccttcctacctgaagggtgagttcgctggcgactacggctgggacacctctggcctgtccgccgatcccgagaccttctcccgctacagggaggttgaggtgatccatgcccggtgggccatgcttggcgcccttggctgcgtcgtgcccgagctgctggaccgca

SEQ ID NO: 2910 - DNA, 459 bp, Chlorella vulgaris
  unsure (1)..(459): unsure at all n locations
ttccagggtccacccacgcgtccgcagatcttgtgctttcttgttaatagttatcgaggggacaatgcaggccactatgtcgagggtcgctctgggcagcatcgcgggcctgaggcccgctgctactgttcgtcccanggccagcangacggtggtgagggccatggctgacaagccggcccctggcagcctgcaggttgtagcgcccatcaacggcgacccctacattggcatgctggagacccccgtgacctccgcacccctggttgcctggtacctttccaacctgcccgcctaccgcaccggcgtgtcccccctgctccgcggcgtggagattggccttgcccacggcttcttcctggtcggccccttcatcaagcttggccctctgcgcaacactgacgttgccgacattgtgggctgcattaacggcgccgccctggtgctgattctgacact

SEQ ID NO: 2911 - DNA, 424 bp, Chlorella vulgaris
gccacccacgcgtccggagggcacatggactgcaaccatgccgaagcagattgaggagatcaaggagtttctcctcaccgccaggcgcaaggatgcccggtctgtgaagatcaagaagaccggcgatgtgaccaagttcaaggtccgctgctcacggtacctgtacaccctctgcgtgaccgactccgacaaggcagacaagctcaagcagtcgctgccgcccggcctgcatgtgcaggagatctgagaagtggagtcgttgtagcagtgatgagtagcgcatgcagcagacggccggaggttgcagcgcgcccagctgtcgccacctgtgtgtagcagcctgctgggcggggtgtgcagcaaggccaccgggtaggagcagcagcggtggcttgcggagcgatgctgtaacaaggtgaccact

SEQ ID NO: 2912 - DNA, 404 bp, Chlorella vulgaris
  unsure (1)..(404): unsure at all n locations
ccacccacgcgtccgcacacgcgtccggccggaggcatactgctcttccctttcttctacttcctcaaggttacgaagggggttgacttgcccacctgngttgtgtacatcgcgtcgacgctcacctttggcggcgggcttgccggcatcacgtacggcatcttgagcagctcctgggacccccggcgggagggcagcttcctaggtgtcaccgagttccaggcaaacctgcccatcctgatggagaggttcaagcgcaactagggaaggccagcttcagactagactcgactaaactagagagggccggggaggggctgaggtgggcctgcgtcnccacagccaagctagcctgggaggaggaggcatattgcctgccagcatgaaacacagcttgagaaatg

SEQ ID NO: 2913 - DNA, 445 bp, Chlorella vulgaris
  unsure (1)..(445): unsure at all n locations
tccacccacgcgtccgcacacgcgtacgcccacgcgtccggtgctcaaccagcgtctcaaggtgccccccgcactgaaccgcttcacccgcacgctggacaagaacatggccgagagcctgttcaagctgctgctcaagtaccgccccgaggacaaggcagccaagaagcagcggctgctggctgaggccgaggcccgtaccgccggcaaggaggtggagaagaagaagcccgtggtggtcaagtttgggctgaaccacatcaccacgctggtggagcagggcaaggcgcagctggtggtcatcgcgcacgacgtggaccccatcgagattgtggtctggctgcccgcgctgtgcaagaagatgggcgtgccctacgtcatcgtcaagggcaaggcccgcctgngcaccgtcgtgcacaagaagaccgccactgccctggcgctg

SEQ ID NO: 2914 - DNA, 469 bp, Chlorella vulgaris
cccggggccacccacgcgtccgcaagatttccagccaggaggtgaacgagctcattggcaagtttgccaagaagggcctgaccccctcccagatcggtgtgctgctgcgtgacagccacggcgtggcccaggtcaagtctgtgaccggcagcaagatcctccgcatccttaagggccagggtttggctcctgagatccccgaggatctgtaccatctgatcaagaaggccgtgtccatgcgcaagcacttggaggccaaccgcaaggacaaggacgccaagttccacctgattctggtggagtcgcgcatccaccgcctggcccgctactacaagaagaccaagaagctgccgcccaactggaagtacgagtccgccaccgcctccgccctggtcgcataagctgtgttcaaagcagctgcggctggctggatgatgccggcactgctggagccaggcaatgggctgac

SEQ ID NO: 2915 - DNA, 379 bp, Chlorella vulgaris
ttttgatttgctgctggttgcatgtggtcttcgtactgacgtagataatgtccaaatgaggttaaaactccaaaaaaatccccttaaataaccatatcggaaaacttgcaaccatcaaaacccaacccttaaaccacagccttgcatttttttcaaaaccaaactcatgttttccaaaggtataatcaaaatctcaccatcgcagctgcaaaaaaaagaacagataataaaagtgaacaacagaaagagaaaggaagacacaattcatcacagatgacatctcaacatccctgcacatacactacctgcccatctgactacagccaacagataaatccgactacacacaaccaaaagttctaacaaacatagtaccctg

SEQ ID NO: 2916 - DNA, 397 bp, Chlorella vulgaris
  unsure (1)..(397): unsure at all n locations
tttaagaatgaagaatataatcaatcctggataataatcaaatgaaatgttcgaaacctttttaaccaaaggccagcaaatcccaagccaaaacaaagaagggaaaccctgaagccattttaaacatgaatcccctgaaagcttttggttaagcacgaacgggaggaacaacaaccggttgcggaaacgttctggatgccaataataggctgcacaacgacacgctcctttagcaagcaggtcaacaagcagagggctggggagtgtccccccgggtggggtggaaagccagctggctgttcttgtacttgatgacgctgtccaagtagatgtcagagaggtacnaggagtcnagggggactcccttggnctcggggtggaactgggtgctgaagat

SEQ ID NO: 2917 - DNA, 435 bp, Chlorella vulgaris
ttcccggggtcacccacgcgtccgcacacgcgtccgcccacgcgtccgcatagttttacacaggtgggcagcccgtgccgcttacgctctgctggccggaccaaccttccgccagacccactgggagcggcaccatgcccatgtttccttcctggattgaagccatcgttccctgtgccatcatcactgtcatggtcgccggcatgggcgggctgcaaggggctgtgcataaggccttctatggcaggccaaaggcgcacggtgtggacgagtgggacaggctgatcgagggcagggatgagcgccttgcaaaggagtatcagacagctcagcagtaccagagcgcccagtaaactggggccggccttggtgtggaacctgtgcgtggtgacacttttcgagctgctgtttgttgtgtgatgtgttgttcagtgt

SEQ ID NO: 2918 - DNA, 389 bp, Chlorella vulgaris
ccgggtccacccacacgtccgcaagcccctaacaaagatgcaggccaccctttcctctcgcgcttcccttgttaggggccaggccctgaaggcctctcggcctgcccgccgtgtggctgtcagggctgctgggaagtcctttgccgcctatgacaaggagagccagttcttcgacctgaacgacctggagaacaccctgggcagctgggacatgtacggccaggaccaggagaagcagcgctacaacgggctgcagagcgagttcttcaaccgcgcggccggcagcctgaaccggcgggagtacctgctgggcctggtggcactcggcggcgtaggcatcctggtgtggggcggcaagggctccaaggacatcaagctgcccatcaccg

SEQ ID NO: 2919 - DNA, 440 bp, Chlorella vulgaris
tcccgggttcacccacgcgtccgaatgaagcctcccagcgcagcggctttagccaaagccaaggagctattacaattagcggacagctcaacgccgacagagctggatctgcccacaggagcgggctggccagcactcccagtcgtcacgccggacggactgcaaacccactttgttgcaccgttggcggaagcaggcgtggacgtaagagatcccaacaggttgacgatgagcaagcggggccgcgcaggggaggaatgagcacagcaaccctcatatctgctggtcccattaggctctacagcctgcttatgctggagccctagccgaagccagtggcaagcggcgggcagccgtgccgtgctctgtatgggcacaccatgcagtatacatatgacacgcatgcaacgctgcactgtgcctaagagaaagcaatgcta

SEQ ID NO: 2920 - DNA, 136 bp, Chlorella vulgaris
ccacgcgtccgcagacgcgtgggcggagaacttcctggtggccaagaccaagctggacatcgtggtgatgagggaccaggtggatacggtggtgcggctggtggccaccgccgcccacacccgcgcagattggcga

SEQ ID NO: 2921 - DNA, 437 bp, Chlorella vulgaris
tccacccacgcgtccgcacacgcgtccgcccacgcgtccgaaggaggctggcattccctccaagcttgcccccaccattggcattgcagtggaccaccgccgcaagaacaggtcccttgaggggcttcaggagaatgtgaaccgcctgaaggcctacaaggccaacctggtggtgttcccgcgccgcgccggcaagcccaaggccggcgatgccagcgcggaggagctcaaggcggtcgcgcagctcagcggcccggtgctgcccgtcacacgcgctgcgcccgctctggagaaggttgccatcaccgccgagatgaaggccgagaaggcataccacaccctgcgcacggagcgcatgaatgcccgcctggttggcgtgcgcgccaagcgcgccgcagaggaggcagcagcagccaaggacgccgcataagcggggg

SEQ ID NO: 2922 - DNA, 328 bp, Chlorella vulgaris
ttcctcattctaaagtttctaattcttaagcgtaagtcagctggttccaggtgaaatacaggcataagcgccatggcaagaaccatcatctggcccacctgaagctttgcatccattataaaaactattacgactctccaatttacaggctagtggttcgcttcattaagactgaagttgagtttcaggtgacatcatctaagctctccggtgatgtcctcgttagcggtgcctaagctcaataatttcgcaactattgtctgaaggtggacctgcccaaatatgctgacaaataattcactggcttgctgcttgcctccaggtgctg

SEQ ID NO: 2923 - DNA, 464 bp, Chlorella vulgaris
gtccgcatgtcccggggtcacccacgcgtccgaacttcagcaaaagatccacgatgcagaccgcctttgtccgctccggcctccgtgccgccgtccccaccgctggcaagggcacccgccaggtgacccgcgcctctgtggagtggtacggccctgaccgcgccaagttcctgggtcccttcaccaaccccccctcttacctgaagggtgagttcgctggcgactacggctgggacacctctggcctgtccgctgatcccgagaccttctcccgctacagggaggttgaggtgatccatgcccggtgggccatgcttggcgccctgggctgcgtcgtgcccgagctgctggaccgcaacggcaccgtcaactttggcgagaacgccgtgtggttcaaggctggtgccgccatctttggtgatgacgggctcaactacctgggcaacccctcccctcatccacgc

SEQ ID NO: 2924 - DNA, 443 bp, Chlorella vulgaris
  unsure (1)..(443): unsure at all n locations
tccacccacgcgtccggatctcgtagcggctcctgcaaacatgggtaaggtcnacggctccctcgcccgtgccggtaaggtgcgcggccagactcccaaggtccccaagcaggacaagaaaaagaaccccaagggcagggcgctcaagcgcatcaagtacaacaggcgttttgtgaatgttgtggttggctttggcaagaagaggggccccaactcccagtaaagcctgagcctgggtcaacagaggccgccttgccagagagatgtaaaaggagttccgctgggggcgtggcacgagacttatgcagcctggcagtcacagcggggcagtcatagccaggcaggaccagcggaggaccactgcagtgacatatcttggctgtcagcttcccccgatgtaagagcttcagcgccaaaaaaaacaccctaaaaaacaccacaac

SEQ ID NO: 2925 - DNA, 423 bp, Chlorella vulgaris
ttccaggggccacccacgcgtccgcacacgcgtccgcccacgcgtccgcccacgcgtccgcccacgcgtccgggcggcaagctgattgatgccgaccccaacctggattgggccgccaacctggcacacatgatgggctattccgacgagggctgcctggagatgatgcgcctgtaccagaccatccatgccgaccatgagggaggcaacgtgtcggcacatgccacccacctggtgggctccgccctgtcagacccctacctgtcctttgctgcgggcatgacgggcctagcgggccccctgcacggcctggcaaaccaggaggtgctgcggtggattaacgagaccacacacgacctgggaaccgccacccccaccaaggagcagctgcaggagtttgtgtgggcgacgcctcaggggggc

SEQ ID NO: 2926 - DNA, 470 bp, Chlorella vulgaris
ccgggtccacccacgcgtccggtggaatcccccgtcgacaacaggtccaaggttcacaagatgcagaccctctctgcccgtttcggcgtccgcgcccctgtctcccggggcacccgccaggtgacccgcgcctccgtggagtggtacggccccgaccgcgccaagttcctgggccccttcaccaaccccccttcctacctgaagggtgagttcgctggcgactacggctgggacacctctggcctgtccgccgatcccgagaccttctcccgctacagggaggttgaggtgatccatgcccggtgggccatgcttggcgcccttggctgcgtcgtgcccgagctgctggaccgcaacggcaccgtcaactttggcgagaacgccgtgtggttcaaggccggtgccgccatcttcggcgatgacgggctgaacttactgggcaacccctccctcatccacgcaaagtccat

SEQ ID NO: 2927 - DNA, 437 bp, Chlorella vulgaris
  unsure (1)..(437): unsure at all n locations
cgggtccacccacgcgtccggtttctacccaggcccactcccccaggcagaaacaagatggtggctctccagattctcgcagcgactgccaagggcaccgtcaagggtaccgttaagggtaccgcaaagcaggcagcgaagaccgtgaagaaggcggccatcaagaccgcaaagaaggtcgcccccaagaagggtggcgtggagtggtacggccccaacaggcccctgttcctgggcccctacagccccgagcccccgagccacctgaagggtgagttcgctggcgactacggctgggacacctccggcctgtccgccgatcccgagaccttctcccgctacagggagattgaggtgatccatgcccgctgggccatgcttggcgcgctgggctgcgtcgtgcccgagctgcttgnnacagacaaccacgtgccctg

SEQ ID NO: 2928 - DNA, 290 bp, Chlorella vulgaris
ttcccgggtccacccacgcgtccgcacacgcgtccgcccacgcgtccgggggcgcacaaaatcaagctgcatgacgggcagacaacactaagtgccacacagtgccccaattcaggccatgcgtagggcatgagcaagccaagtccttggcaaagtctaagctaagcatggcggcattggaagtaccaaaggtgtccactgcttcagcccaggtaggtaaggtacccttcatgccagcgaacagctgtgcttgttgagaagcttagactctggctcataatgtggtggtg

SEQ ID NO: 2929 - DNA, 466 bp, Chlorella vulgaris
tcccgggtccacccacgcgtccgcactgtccctgtctaccagggtaacccatcagcagggattgaaggccaagaacaatggtcaggcacaacaacgtggtgcccaaccagcacttcaggaagaagtggcaggacaaagtcaggacctggttcaaccagcccgctcgcaagctccggaggaggaatgcccgcgccgagaaggccaagaaggtgttcccccgccccaccgcgggcgcgctgaggcccatcgtgcacggccagaccgtcaagtataacatgaagaagcgcgcgggccgcggcttcacgctggaggagctcaaggaggctggcattccctccaagcttgcccccaccattggcattgcagtggaccaccgccgcaagaacaggtcccttgaggggcttcaggagaatgtgaaccgcctgaaggcctacaaggccaacctggtggtgttcccgcgccgcgc

SEQ ID NO: 2930 - DNA, 441 bp, Chlorella vulgaris
gtccaccacgcgtccgcatgttgaggttgcccaggcgcacaacgcccttgaggctgtgcatactgatgtggactcgttggccggcgtgctcaaggagaacaaggacgtgaaggacttcttgagcaaccccacagccaaggtggagaacaagaaggccctcatcaagcgcctagcctccgaatcaggtttcaaccagtacaccgtcaacttcctgaacctgctggttgacggcaaccgtattgacgcgattgatgagatttgcgagtcatttgaagtgtcctattgcgcgcttaccgacacacaggtggccacgctgcgctctgctgtgaagctggagcaggagcagcagttcctgattgccaagaagctgcaggagctgaccggcagcaagaacatcaagctgaagcccgtgatcgacgagtcgctcatcgccggctttgt

SEQ ID NO: 2931 - DNA, 456 bp, Chlorella vulgaris
gggtcgacccacgcatccgaccacgcatccgtcggccaacgcgtccgcccacgcgtccgatccgactcaagcggtctgccaagtccaagggcggcttttaggtggagccggaggccaagctgttgtttgtggtgcgcatccgcggtatgaacgacgtggcgcccaagaccaagaagatcctgcagctgctgcgcctgcgccagatccacaacggagtcttcctcaaggtgagcaaggccaccatcaacatgctgcatcgcgtggagccttatgtggcgtacggctaccctaacctcaagacagtgagggagctgatctacaagcgcggctttggcaaagtgaacaagtcgcgcgtggcgctgaccgacaatgccatcgttgaggaggctctcggggagaagggcatcatctgcgtggaggatctgatccacgagatctacactgtgggccccgcct

SEQ ID NO: 2932 - DNA, 465 bp, Chlorella vulgaris
  unsure (1)..(465): unsure at all n locations
ttcccgggtccacccacgcgtccgcacgcccccagtcggggtgatggtggatgcagtcatgggcgatggcggcagccccagcgagaaccagccagatgtgaagaagatgaccgtccaggccatgaagcagtggctgatggaccatggacaggaggagcaggtctggcagatgtctagcaagaaggcaaagaaggcggactgggaggcggcggtcaggcaggccctgtgattatagcggctgccagtagcagcgtttactgtagctgagtgggatgagtggaagagtgatggcagcattgcagcaagacgagctggttttgttgcatagcgacctacagatagcgtgctgtggcatgggtggatcccntcttgatggcctgccttctgaaacagggtattcctttaattgcactgcacaggccatcgcccgcaagacatgtanttgcgcttgagcaaagccccgcg

SEQ ID NO: 2933 - DNA, 372 bp, Chlorella vulgaris
ttcccgggtccacccacgcgtccgggagcgggcaagatggtgcagcgtctcacttacaggcggcgtcacagctacgccaccaagtccaacaagcagcgcctggtgaagacgccaggtggcaagcttgtgtatcagctgctcaagaagccgagctccatcccgacttgcccgatcagcggtcagaggctgaacggcctgcccgctcgccgccccgacaccctctctcgcatcagcaagtcagagaagaccgtccaccgtgcttatggcggccacctcagccatgctgtcgtgaaggagcgcatcatcagggctttcctggtggaggagcagaagatagtgaagaaggtgctcaagctgcagaatgccaatgag

SEQ ID NO: 2934 - DNA, 380 bp, Chlorella vulgaris
cccacgcgtccggaccaagttgatgcaccacttagcgactcgcaatcataggtcagcaatgaaggcaatcacctatgacacgttctggaatgaaggatgacaaacccgagtttagtgctctgcgtttgttgactgtggcaggtggtgaagaaacgattggaaagaaactggggcggctggatgtcgttttgtgcgaagtttgtgtgccatggtcaccctcataggcagggttggtcgtgagcagagagtggtcactaatgagaaacagtgccaaatgctatgtggccagtagttgtctgtaattcacgttttacatttcgtgcgcaggcatcccatcctagttggtataggtgggtcggcaatgtgaacaaagaggaggt

SEQ ID NO: 2935 - DNA, 378 bp, Chlorella vulgaris
cccgggtccacccacgagtccggacatcatggcgcgcacaggtatcgccgtgggccttaccaagggccatgtggtcaccaagaaggagaaggccgtgaggcccgctaaccgcaaggggaggctgtccaagcgcgtcaagtttgtgcgtgacatcatccgcgaggtggccggccaggcgccctacgagaagcgcgtgattgagctgctcaaggtcggcaaggacaagcgcgccctcaaggtctgcaagaggaagctcggaacccacatccgcgccaagaggaagagggaggagatgagcgccctgctgcgcaaggtccacaagaagtgaatgcagccggctgccagcctgctggtactgggcttgctaatgtaacacat

SEQ ID NO: 2936 - DNA, 413 bp, Chlorella vulgaris
ctccgggtcgacccacacgtccgggagtgggctagcccatcaagtggacatcccccaatgacgtcatctgcaaggtggcgggcatcctgtccgtcaagggcggcaccggcgcgattgtggagtactttggccccggcgtggccgagctgtcgtgcaccggccaggccactatttgcaacatgggtgccgagatcggggccaccaccagcatgttcccctggtcacagaagcagtacgagtacctggtggcaaccagccgagagaacatcgccaagctggccaaggacttcagcgagaacctcaaggcggacgagggcgcggagtatgaccaggtgatcaccatcgacctgagcaccttggagccccagattaacgggcccttcacgcccgacctggcacacggacttaccgag

SEQ ID NO: 2937 - DNA, 378 bp, Chlorella vulgaris
ttcctgggtccacccacgcgtccgcacacgcgtacgcggacgcgtgggcttaaagatgtcggccgccgctcaaaccgtgcctgaggctgtcttgaagaaaaggcggagggatgaggagtgggcagcaaagaaggctgctgacgctgctgaggccagcaagaaggccagggctacccgcaaggagatcttcaagcgggcggagcagtatgtgaagcagtaccgtgcacaggaggcggacctgatccgactcaagcggtctgccaagtccaagggcggcttttatgtggagccggaggccaagctgttgtttgtggtgcgcatccgcggtatgaacgacgtggcgcccaagaccaagaagattctgcagctgctgcgcct

SEQ ID NO: 2938 - DNA, 455 bp, Chlorella vulgaris
ttcccgggtccacccacgcgtccggaaggccctgaagaaggagcactgctgcaacggcaccatcgtggaggacgaggatcttggcaaggtgctgcagcttcagggcgaccagcgcaagaacgttacggcgttcttgattggcaacgagctgtgcaaaaaggacaacgttaaggtgcacggcttctaagcgccgtcctttgggtaccggcaggagggaaagcagcaaacctgccggataaggatttgtagggtcactgggctcggcaccagcagcatagcaggcttagagaggctagcggcgcgtcggggcctgcttgtattatacatcctgtattgttttagtttgttttcgggcaactctgacaggtgcaggcttgtgtaggacaggctgtgcatcggcgcacaagacgtaggttccttgtctagctctcctagtcatgctggttgctgctgcc

SEQ ID NO: 2939 - DNA, 229 bp, Chlorella vulgaris
cccacgagtccgtacggcttgggtcggtggaggaggtgctgcaccaggcagacgtggtcagccttcattgcaacctctatgacaccacccgccacctcatcaactccaagcgcctcgctctgatgaagcccgacccggtgctggtcaacgcggcgcgcggctgcgtcatccatgagtcagccttagtcggatatctccaggcgcaccccggcctttccgggtggggctt

SEQ ID NO: 2940 - DNA, 430 bp, Chlorella vulgaris
gggtcgacccaaacgtccgagtggatctgctgaagaccgaaacgggcaaccatgcaaattttctgcaaaacagacaagactcatgtccttgaacttaactcccaaggcaatgttgcccatgttaaaggtgccaaccaaggcaaccaagggaatccctgccaatcccaaccttttaagttccccggtccccaacttgaagaagagggcctccttgccccctgcggcgtgtctgacgaaagccagctgtacatcctgatgcgcctgctgggtggtgccaagaagcgcaagaagaagacctacaccaagcccaagaagcagaagcacaagcacaagaagatcaagctcagggtgctcaagttctacaaggtagacgacagcggcaaggtgcagcgcctgcgcaaggtttgcccccagtgcggccccggcatct

SEQ ID NO: 2941 - DNA, 437 bp, Chlorella vulgaris
cccgggtccacccacgacgtccggggagagccgcaaaaatggcgtcggacaagaaggctcagaaccccatgcgcgagatccgcgtcgcaaagctcatcctcaactgctgcaccggcgagtctggtgatcgcctgcagaaggcggcaaaggtgcttgagcagctgaccgggcagcagcctgtgtttggcaaggcccgctacaccgttcgccagtgggccatccgccgtaacgagaagatctcctgccaacgtcaccgtgcgcggggagaaggccgtgcagctgctggaggccgggctcaaggttcgggagtacgagctgcttcgtcgcaacttctctgacagcggcaactttggctttggcatcaatgagcacattgacctgggcatcaagtacgacccctccaccggcatctacggcatggacttctacgtggtgct

SEQ ID NO: 2942 - DNA, 471 bp, Chlorella vulgaris
aggtcctacattcccgggtccacccacgcgtccgcacacgcgtccgatttacttaaagatgtcggccgccgctcagaccgtgcctgaggctgtcttgaagaagaggcggagggatgaggagtgggcagcaaagaaggctgctgacgctgctgaggccagcaagaaggccagggctacccgcaaggagatcttcaagcgggcggagcagtatgtgaagcagtaccgtgcacaggaggcggacctgatccgactcaagcggtctgccaagtccaagggcggcttttatgtggagccggaggccaagctgttgtttgtggtgcgcatccgcggtatgaacgacgtggcgcccaagaccaagaagatcctgcagctgctgcgcctgcgccagatccacaacggagtcttcctcaaggtgagcaaggccaccatcaacatgctgcagcgcgtggagccttatgtggcgtacggcta

SEQ ID NO: 2943 - DNA, 52 bp, Chlorella vulgaris
ccttgagccaacctcatcgctcctcaaggatatgtccgatggtattcaggat

SEQ ID NO: 2944 - DNA, 477 bp, Chlorella vulgaris
gtaacggtcctaaagtcccgggtccacccacgcgtccgcccacgcgtccgcccacgcgtccggtccaagccccttcagcaaaagatccacgatgcagaccgcctttgtccgctccggcctccgtgccgccgtccccaccgctggcaagggcacccgccaggtgacccgcgcctctgtggagtggtacggccctgaccgcgccaagttcctgggtcccttcaccaaccccccctcttacctgaagggtgagttcgctggcgactacggctgggacacctctggcctgtccgctgatcccgagaccttctcccgctacagggaggttgaggtgatccatgcccggtgggccatgcttggcgccctgggctgcgtcgtgcccgagctgctggaccgcaacggcaccgtcaactttggcgagaacgccgtgtggttcaaggctggtgccgccatctttggtgatgacgggctcaactacct

SEQ ID NO: 2945 - DNA, 433 bp, Chlorella vulgaris
cccgggtccacccacgacgtccgaagacgcgtgggcgaaacctaagccaccatggttgacgagaagaaggtcaaggccgcaatcaaggagggtggcaagaagggcgtggacctatgcggtacctgcgacatgggcggcgtgtccttcttcaaccttgccatcgagtctgccgatggcgagtttgagctcctggacaaggtgctggagggagccaacgcccctgttgacgaggccgctgaggagcgcaagggcggcgccgctaacatcggcaagttcttcttctctgctggtgaccaccagctggctgccctgtgccacctgcccaaggccctggctgagtccaagagcgtgaagaagcaggactgggtggatgccgtgctcaaggtcctacccggcgcagagattgttgaggagaccgaggaggtcaccaaga

SEQ ID NO: 2946 - DNA, 90 bp, Chlorella vulgaris
aagtgctacttatcgtgtagtcgatccagttcacagcacttctcccaattatcaacaggaggtcctgtgattacacggtcgttgccaatg

SEQ ID NO: 2947 - DNA, 449 bp, Chlorella vulgaris
cccgggtccacccacgacgtccggaaaagtatagcatggttgtagtggaggtgggccgggatgaaacgcctgaagaggtggcggctaggatccaagaagcagtgaagctggctggcccagctggagccacggcgagcaatggcaccgctactgcgactgtcaggagtggcgcagcaaaggcagcagcagggagtcctgagctcagggcaccgctgctggaggtctaggcgggttggtgttgcctggatccccttcagcatgtgtcgtattgttgcagatattctgagcacgtcctttgaccaagacgcttgttgtatgcccctgtgtaagaacaaggcataacagtgcacacctcttgtgtgaaatacaagtgtatgctctgaaaatgtacactagaaagcagtgctcgagtgacacgttgtatgctggttagttactctattgcctct

SEQ ID NO: 2948 - DNA, 436 bp, Chlorella vulgaris
ttcccgggtccacccacgcgtccgcacagcggctgtatcacttctccttatcctgccttcaacagatacagttgcactaagatggcccccaccgctgtcatgcagctgcaactgcagcaggttcgcaaggtcactcgccaggccgcctcccataaggcctttgtggctgcccctgtcgccaggaaggccagcgtgcagcccgcagccatcagccgacccgcccccagccggagggtcgctgtcaaggctgttgccgaggccaaggcccctgcagcaaccgcagccagcacccaggagtggtacgcctgcgtggccagcgccgagtttttctacaacgacgtccagaatgagcctttcgctgagcagctgcgtgagaagaagaggtggtttgaggagcaggacaaggagctggacttttaccttgtgtctcagcctg

SEQ ID NO: 2949 - DNA, 456 bp, Chlorella vulgaris
ccgggtccacccacgcgtccggaggccctccctgcagcgttggattaaggctgtgcaaggatggggtcgctcgttgccaacgagaactttacgcatatcctgcgtgtgctcaacaccaacgttgatggcaagcagaagattatgtacgccctgaccgccatcaggggtattggccgccgcttttccaacatctgctgcaagaaggctgaggttgacctgaacaagagggccggtgagctgagccccgaggagctggagagcatcatgaccattgtggccaacccccgcgcctacaaggtgcccgactggttcctcaacaggcagaaggacatccgcgatggccgcttcagccagacgacctcatctgccctggacaccaagttgcgtgacgacctggagcgccttaagaagatcaggaaccaccgcggcctgcgccactattggggcctgactgtg

SEQ ID NO: 2950 - DNA, 303 bp, Chlorella vulgaris
ttcccggggtcacccacacgtccgaaatgggcttctccctattcgactaagcgcacggcggaccgcacagcggagaggggtcgtgtgatgcctctgaatctagccgtgtaagaatctccctttcaaaaaaaaaaaaaaaaaaaaaaaaaaaaaaaaaaaaaaaaaaaaaaaaaaaaaaaaaaaaaaaaaaaaaaaaaaaaaaaaaaaaaaaaaaaaggggaggccgcccaaaaggatcaaagcttacttacccttgaatgcaaattcaaacctcttcaaaagtgtcaccaaaattaaattaaa

SEQ ID NO: 2951 - DNA, 425 bp, Chlorella vulgaris
ccgggtccacccacacgtccgcccacgcgtccggtcaacctgtcgtgcgtcttcttcgccacacaggctgccaccaagatcatggggcgcaagcgcaaggggcgcatcatcaacatcgcctccgtggtgggcctggtgggcaacgctggccaggccaactatgccgcggccaagggaggcctcattgccatgactaagactgtggctcgggagtacggcacccgcggcattaccgccaactcagtggcaccaggcttcatcgagtcggacatgaccaacgagattgatgagaagtataaggatgccatcatcggcagcatccccctaggtcggtacggccaacccgaagaagtggctaccctggtgcggtacctggccctagaccccggcgcagcatatatcactggccagaccttcgctatcga

SEQ ID NO: 2952 - DNA, 221 bp, Chlorella vulgaris
ccccaaaaggatccaacctaacttacccttccatgcaacttcatacctcttcaatattccccccaaaattaaattcacgggccttcgtttaaaaacttcttaactggaaaacccttggctttacccacttaaatccctttgcataaaatccccttttcgccacctggcttaatcccaaaaaggccagcaccaatcgcccttccaattatttccccacccta

SEQ ID NO: 2953 - DNA, 455 bp, Chlorella vulgaris
attcccgggtccacccacgcgtccggctgcgcactcgacgcttggggattgtgaagtgtgtgtgccttccagcggacggacctgcacagggggtctagcctttggcagcttgtgaacgtgcaccgtgctgtgcatgtcgtgatggtgaggtgtgtctaggtgcaggccatgcagtgtcttgtcggctgcttcaagtgggctgggttgtggcagtttctgattcgctgcctgccctcggtaacagtctgtttagatgtggactacaaagcctgcttaagtaccttgccgcggttgtcactaaggcccgacagggtgtgcacatgtgttgtgtggcctcatgtgcacatgggagccgcactgcagtcgtcttgagtttccctgtcggtcactggtcaaacgtgtttcccaggtggctgccttagccacagacggtggggagtgcgtgggcagggggg

SEQ ID NO: 2954 - DNA, 437 bp, Chlorella vulgaris
attcccgggtcgacccacacgtccgaagcgaacaaccatggcgccaaaggagcagaagtccaaggaggccaaggccatggctgcggccaatgccagcaagggcaagaagaagaagtggtcaaagggcaagatgaaggagaaggtcaacaatatggtcaagttcgacaaggccacatatgagaagctgttgacagaggtgcccaagtacaagatgatcactccctctgtgctctctgacaggctcaggatcaacggcagccttgcccgtgccgccatcaaggagctccttggccagggtctcatcaaggttgtggccaaaagcgcaagccaggagatctacactcgagccaccgctgctgcatgattgactgaatgtttgaaggggcagctgtgttggaaggcttggcaaattccgatgtaaatgcagaagccccggc

SEQ ID NO: 2955 - DNA, 207 bp, Chlorella vulgaris
acccaaacgtccgcccacgcgtccgcggacgcgtgggaaaaaaaaaaaaaaaaaaaaaaaaaaaaaaaaaaaaaaaaaaaaaaaaaaaaaaaaaaaaaaaaaaaaaaaaaagaaggcagggcggccgctctaaaggttccatccttatgtacccatgcatgcaacttcacaacccttctacattgtctcctaaattcagttcatcgt

SEQ ID NO: 2956 - DNA, 240 bp, Chlorella vulgaris
ttcccgggtccacccacgcgtccgaccacgcgtccggccaggtgcctttgtgcgccaggtcatctgcatcgctgagctctggtgcttcattgaatgctgcttctcctgcgcttcgttctgttacatgtgtcgacctgtgtgtgtttagtctactgggaatcagtatcgaatacatgatcgcctttaccatgcccaattacaacgttaaaggtgcattcgctggagactagcgacgcaaca

SEQ ID NO: 2957 - DNA, 404 bp, Chlorella vulgaris
ccgcgcgtccggagtgataataatgccgtgtcccggtgagcacactatatgcgaatgtttgctatatacagaggctggctagctcctcccctgccccccactagtgtagtgtggctcttgtgatacagtaggatgttcagtagcttgtcttgaagctcgttcttggtagtgccatcagccatcaaccatcattatgtgtgcgggttaagaagacgcagcatgatcattctgatgcatgtgctggtgtttgagttgttcttttgggcttggctgtctcacgtgtggactactgtatcgccttgtgcttcaacagatcagcagatgcattgtcaccttgttgtcatctgacagcaacacctgtgaacccctgtaccaggaatgggaatgtaacctttgccaatgcc

SEQ ID NO: 2958 - DNA, 443 bp, Chlorella vulgaris
cccgggtccacccacgcgtccgtacccggcgggcagggagctggcactgctgggcatcgggctgaggtccaactttgaggcgtgcaagcagctgatggcgggcgacctgctgggcacgcggcgcttcgcggtggtgcgggacgactttgagcagcaccaggaccgcatgcacctggactgcgtgttcagcatcatcagcgacaacgtgtgcatcatgccggaggagatgatcggagtggacgcgcccacacgcaggctggttgatgagtacaccaaggggccagatggcgtgtaccacatgtcgcggcatgacgtggagttcagccagtacatgcgcgacaacggctaccacatcatccccatcaagcccaagcaccagctggagtatggctgcaactgcctcaacctggggcaggagcgcatcatctctgtgcacccagaga

SEQ ID NO: 2959 - DNA, 425 bp, Chlorella vulgaris
gggtccacccacgcgtccggatagccaggcgtttagggaggcccagcagtgcaagcgaagcacagccctccggtgcagcgcagcaggacgatgagcatgccaacacccttcgggcgcggcaggtggacactgagcttgcgccaacctgggtaactggaatcctggaggtgccgctggggctggagcacaagctgaagaacatcgaggagacagaggctgccaagaagcgcatgctggagcggagcggtgctagggttgtaattggagccgacgaagatgacgatgacgaggggggtggcggtcagcaggggctgcggcggggcatgtacccggtgcactttgggcggcagcgagagggagaagcggagcgaatacaggcatccatggcgaagaagcggaggatgcgggaggtacaacgtgaaaag

SEQ ID NO: 2960 - DNA, 463 bp, Chlorella vulgaris
ccgggtccacccacgcgtccgcagcccttgattgcggacgggtgctttagaccccataagtttgcttgctccaccaaggcagcagctcacgccatgccaacagcagtattcggggccaaaccccgtgcggtatgcagccggccaagcaccgcccgcataggcaggcatggggtgatggtgtgtgccatggccaagcacaaggagaacggtgcagcgcccgcagtccggccacgccccgagtacatccctaacaggatcgacgaccccaattatgtgaggatttttgataccaccctgcgtgacggggagcaaagccctggagctaccctgacatccaaggagaagattgagattgccaagcagctgtcaaagctgggcgtggatatcatagaggctggcttccccatcgcctcccctgatgattttgaggcggtgcgagccattgcccaggaaatcgggaaca

SEQ ID NO: 2961 - DNA, 456 bp, Chlorella vulgaris
ggccacccacgcgtccgcaaacgcgtccggcgagtgagagagctcatcacaacacagtccccttgtcctggcgctgggacggcagcttgggctggctggctccctccctcgccgtgctgcacccctcgctacacctgcctcttgcgctcacctgcaggctggccatatgggacctgggccatgcatgtgggacctgggccagtgtgaccgcaagcactgcacttgcacccccctgtcgcggcagggcgtggtgcaagagctgcgtctggggcaagctctcaaggggtgaccctcagcccggtgggccgcagctgcttgtctcggcaggacaaaaactgatagggagcaagggcttggcggtggtggactgcagctggaaccggctggatgatgttccctttgcgcgcatcaagggccacccctgctgccgtgactcccggtggccaacccatgaac

SEQ ID NO: 2962 - DNA, 71 bp, Chlorella vulgaris
taaaggatgcaacctaacgtaagcgggaatgcaacttcaaaccccttcaaaagtgtcaccaaaattcattt

SEQ ID NO: 2963 - DNA, 411 bp, Chlorella vulgaris
ttcccgggtcgaccagacgtcgaaagcccaggacatatgggcgtacctcaaagacgcgactgccaagtagacggcggcccgacgccgccgtgctgccgctgtcgcagcacgctgcgctggcagccagtcttgtggggcatagtcccgtggtcttgtggttgatgaccgcatgatgaggatgatgcggtggttgtgtggggccacgtggccagcagtttgggcagccacattccaagcatgtgttgtttgttgtggagggcccaccgcagcctgtgaatttggccaagccccttttttgctccgggcgtctgcggctgcgccccacgctagcgctgttggcttaagctggcgtgcgggtccagtttaaggcgtgggacgttgccgcggcaggcgcttttgtgcttggtgcct

SEQ ID NO: 2964 - DNA, 424 bp, Chlorella vulgaris
ccgggtccacccacacgtccgcacacgcgtccgaacgaggtcaactcgaaggctcactgtctggcaccggacccagcggacactgcatgaccaaatttaaaacggaggagtactcttagcttacttggtgcaaccatcgcatcagcacgggtgcagcagctgttgagcaagaccatggcggccattgagcccgcataccaggcggcaagaggccacgttgtcaagacgtatgagtcacaaatggccaacggcgcagaatacgttgtcaaggacccagcagcagcagacaagcttctgaagcagtggttttacacacagctttctcggatacccactaccattgacgcaagcagagctgagtataacactctgcgtgtgaggctggcaaattacaaggacctgcctacaactgagcttgcaacat

SEQ ID NO: 2965 - DNA, 473 bp, Chlorella vulgaris
  unsure (1)..(473): unsure at all n locations
attcccgggtccacccacgcgtccgatgagccaggaggaggtgacctggttcaagaacggcgccttccccttcctgggcacctacgagcgcggctactgggccgacccctacaccctcttctttgtggagatcatcgccatgcagtttgccgagctgcgccgctggcaggacttcaagaagcctggcagcatgagcgagcagtacttcctgggcctggagcacgtgttcaagggctccggcaacccctcgtaccccggcggccagttcttcaacctgttcaacctgggcaagaccgaggccgagctgttcaagcttaagaccaacgagatcaggaacggccgcctggccatgcttgccatgctgggctatggcgcccaaggcgtgctgaccggcgccggccccttcgcctgcctgcaggcacacctggctgaccccgtcnacaacaacctgctcacaaacttcgcccgcgtgt

SEQ ID NO: 2966 - DNA, 302 bp, Chlorella vulgaris
cacacgaaggcccacacgaacggcatcaagaagcccaagaggcagaggttccactcaaccaagggcatggaccccaagttcctgcgcaaccagcgttatgccaagaagcacaacgtcatcaagggggaggaggagaagtgatcagctggataccttccatggagccctgaggtcgtagccagcttagaggaggatggttgtggtggcccgcttgctcgggcgggacttggcgcagcagtgttatgcgcaggatgcagcgacagttttacagtggctgactttgtaaccaaagcggaggaaaa

SEQ ID NO: 2967 - DNA, 427 bp, Chlorella vulgaris
attcacgggtcgaccgacgcgtccgaggccgacttcatccccaaggtgctggatgtcgacctcctggacgaggtggtcacggtctccagccaagaggccctggtgactgccaggaggctggccaaggaggagggaatcttcgtgggcatcagctccggtgccaccggtacagctgccctcaaggttgccagccggccagagaacaagggcaagaccattgtggtggtctttgcctcgcttggggagcgctacctgtccaccaagctctttgaggacttgtatgacgaggcgaaggcccagaccttcgaagagtggaaggccatgctttaggtcgcccgctagaccaacggggctatggcacctggtgactgaaagcagcgttgcgggctgttacatgcttgagtgatattgtgaattgcaaaacctg

SEQ ID NO: 2968 - DNA, 375 bp, Chlorella vulgaris
tttttaatggttccaggattacagtccaaacggatatccttttcatcattccatgcaccaaatgtgtatataggagtctaggagcatctattcaccagcacaccaggctttccaacgaaagaacgcttctcagatcagggtaacgaggcgaagcgccgggcaaagcctgcagcgcccgcatcacccaccaccacaccgcccccatgctgtcagttgctgacaagatgcaacccaacaggtgctgcctccgctgccgctgctctccaaacacaaatccgcccgccgcgcccagccgcctcacgccccccgctccgccaccttgatgcagatgtggcaggtgggcttgaggatggggtacgccctgccctgcgcccg

SEQ ID NO: 2969 - DNA, 424 bp, Chlorella vulgaris
attccaaggtcgacccacccgtccagtgatcgactgcaaaaggcggcaaaggtgcttgagcagctgaccgggcagcagcctgtgtttggcaaggcccgctacaccgttcgccagtgggccatccgccgtaacgagaagatctcctgccacgtcaccgtgcgcggggagaaggccgtgcagctgctggaggccgggctcaaggttcgggagtacgagctgcttcgtcgcaacttctctgacagcggcaactttggctttggcatcaatgagcacattgacctgggcatcaagtacgacccctccaccggcatctacggcatggacttctacgtggtgctggagcgcccggctaccgcgttgcaaacgcggtgccaagctctccaaggtgggcgtgcagcaacgcgtgactaaggatgatgccatc

SEQ ID NO: 2970 - DNA, 432 bp, Chlorella vulgaris
ccgggccgacccacgcgtccaaatagggatcatatcggcacgaaccgtcaacatgccgaagacggtcgtggttgattgccggggccatatgcttggccggctggcgagcatcctcgccaagcagctgctcagcgggcagaatgttgtctgcgtgcgctgcgaggagatcaacatctctggcggcatggtcaggcagaaaatgaagtatgagcgcttcctgaacaagcgcatggttaccaaccccaggagggctgcctacaagttcagggcacccgcccgcatcctgtggaggactgtccgcggcatgatccctcacaagaccccccgcggcgcagcagccctggaccgcctcaaggcctttgagggtgtgccccacccctacgacaaggtgaagcgtctggtgatccccgatgcgctgcgcgtgctccgcct

SEQ ID NO: 2971 - DNA, 159 bp, Chlorella vulgaris
acgacctggaggtggcaccaacaggcccggaccgtttacccttccgaaaaattgcacatcctagaagtgaattgggacgcccccggtatcgggggataaaccgcggagcttgtggtggttacccacgccttgaccgttacagttgacagcgcccaagag

SEQ ID NO: 2972 - DNA, 457 bp, Chlorella vulgaris
attccagggtcgacccgacgcgtccgaggagctgaccttcgacccttgatatcctaacgacgtcgagatggtgtcctgcactgcccaggctgcgctgcagagcactgctttcgcggctaagacccgcgtcagcagggtcacccgcagggccgtcgtggtccgggccgagaaggagaacacccagatcgaaaaggcggaccgcgttgccaagagcggcggccccatctatgtgaacgccactgatggctctgctctgtcgtaccttgacggcagccgccctggcgacttcggtttcgaccccttgggcctcctggaccccgccaccggctctggcggcttcatctcgcccgagtggctgacttactccgaggtcatccactgccgctacgccatgctgggtgcggcgggctgcatcgcccccgagatccttgccgccgccggcgtgattcccatgagc

SEQ ID NO: 2973 - DNA, 395 bp, Chlorella vulgaris
attcacgggtcgacgcacgcgtccgactcgcaccttctcggaagcaggtcaccaccatgcagaccgccaccatgcagaagtccttcgtgggcaccagcgtgaaggcccaggccccccgtgcccgccagaacatgagcaccgtggtggtggcttcctccggcaagaagattgacctgaacaagcagggcatcaactctgtcgagaaccccattgtcaagctgaacctgcgcggcgagagcaagagcatgcagagcaaggactgggtggacccccagggccgcaagggcaagggctttggcgtctaccggtttgccaacaagtatggtgccaacgtggatggctactcccccatctacacccctgacacctggtccgagtctggtgacagctacaag

SEQ ID NO: 2974 - DNA, 394 bp, Chlorella vulgaris
attcacgggtcgacgcacgcgtccgaccacgcgtccgcccacgcgtccgggggcagcggcgtgccctttgccattgtgcggccggtggcgctgaccgaggagccggcgggggcggagctccagctggaccagggagacaccattcgcggcaagatcagccgagaggacgtggcacagctctgcgtcgagctgctgcaacaaccagcagcaacaaacaccaccttcgagatcaagtcaactgtgccgttcagcacacccttcgcagtggatgctgccagcccgccggcgcctcgcgactggcggaccattttggagtccgctcgcttgaggcagcgggtcactggcaagacaatccgcggggtgtatacgggcacagagcctgagcctgaggatg

SEQ ID NO: 2975 - DNA, 403 bp, Chlorella vulgaris
aaaaaaaaaaaaaaaaaaaaaaaaaaaaaaaaaaaaaaaaaaaaaaaaaaaaaaaaaaaaaaaaaaaaaaaaaaaaaaaaaaaaaaaaaaaaaaaaaaaaaaaaaaaaaaaaaaaaaagggggggccgcccaaaaggttcaaaccttacttacccttgaatgcaatttaaaaccccttcaaaagtgccaccaaaattaaattcacgggccttcgtttaaaaacttcataacgggaaaaaccctgggtttacccaatttaacccccttgcaaaaaatccccctttcgcaacctggggtaataccaaaaaacgccccaccttatccccttccaaaaatttgcccaccctaaatggaaaatggaaccccccctttaccgggccaataaaccccgcggttttggggg

SEQ ID NO: 2976 - DNA, 459 bp, Chlorella vulgaris
attcctaggtcgacccgcccgtccgcgcaatagttccagggcaatcactatgcaggcaaccatgatgaagaccttcggcgccagcctgcgcaaggctgtgcccacccagggcaagggcacccgccaggtgacccgcgcctccgtggagtggtacggccctgacagggccaagttcctgggccccttctctgagggctccacccccagctacctgaagggcgagttcgccggcgactacggctgggacactgctggtctgtctgccgatccccaaaccttcgctgcctaccgcgaggttgaggtcatccatgcccgctgggccatgcttggcgccctgggctgcctgacccccgagctgctgcagaacgccggcgtggccagcttcggcgacgctgctgtgtggttcaaggctggtgcctccatcttcggcgatgatggcctgaactacctgggcaaccc

SEQ ID NO: 2977 - DNA, 382 bp, Chlorella vulgaris
gacccgcccgtccgctctatcattcagcaatcatgaggttcgaggtcactgacgagaatctgctcaagctgagcgcggttgcccaggccgctgtgggcctgtcagctttcgtggtgccccggcagacccatgataccctgtatgaaaagacggccacctacagcgagcccaacactcgcaacttcggggctgcactgagcactgccgcggcacagaccttcgctgtgtctgcctccgatttcagccgggatgccaagaagaacttgctgaaggtaaacggcaccagctggctggtgtttgccgcccagggcatctacaacgcccaggacgacatccttcgcaaggatttggcctacacccacgctaccctggcaactgccct

SEQ ID NO: 2978 - DNA, 466 bp, Chlorella vulgaris
  unsure (1)..(466): unsure at all n locations
attccagggtcgacccgacgcgtccgcggacgcgtgggcggacgcgtgggcggacgcgtgggcacgagcgggagccaggcagtcacggcggcggtggcagcaggcgagccagtggtccagtggcccactatgcggaggacccccgcgggctgcgtgggccagcagggccgcatgtgatggtgggtgatgggccgccgccgccgcccccgccaggcagccggccgcagcactcgcccaccacaggaggcatgcaggggcccatgcctgtgccacagatggtgccggggccggtgccgtacatgatgggcgcagctcctgagcaggtcatgatgacgccgcaagggcccatgatggtcatggggccacgaggccccgtgatgtttgtgcctggtggccctggcatggtgccgcctgnagccatggtcatggcgccacagtaccccatgggcttccctggtggtgttcc

SEQ ID NO: 2979 - DNA, 428 bp, Chlorella vulgaris
attcacgggtcgaccgacgcgtccgaccacgcgtccggcgttagcagccgacagccgcacaatatggcggagtcggtgcagaccttcgggcgcaagaagaatgcagtggctgtggcctactgcaagcgtggaaagggggagctgaggctcaatggctcccctctggaccttatccagcctgacaccatgcgctacaaggtgctggagcctgtgctgctcctgggcaagcagcggtttgccaacgtggacatccgcatccgcgtcaagggcggcggccatgtgtctcagatctacgccatccgccaggccatcgccaaggcgctagtggccttctaccagaagtacgtggatgagcagagcaagaacgagatcaaggacatcctgctgcagtacgacaggacactgctggtcgccgattctcgccgctc

SEQ ID NO: 2980 - DNA, 427 bp, Chlorella vulgaris
attcacgggtcgaccgacgcgtccgagcaggcacagcccagccaacatgggtaagaccaggggtatgggcgcggggcgcaagcttcgcctgcaccgccgtgaccagcggtgggcagacaaggactataagaagagccatcttggcaacgagtggaagaagctcttcgccggcgcttcccacgccaagggcatcgtgctggagaagattggcattgaggccaagcagcccaactccgctattcggaagtgcgcgcgtgtgcagctgatcaagaacggcaagaagattgccgccttcgtgccccgcgatggttgcctcaacttcatcgaggagaacgatgaggtgctcattgccggcttcggtcgtcgcggtcatgctgtgggtgatatccccggtgtgcgcttcaaggtggtgaaagtgtctggtgtg

SEQ ID NO: 2981 - DNA, 239 bp, Chlorella vulgaris
ttttgcatgtccttgtaaaaatgcctcccttacttcattggccacacccacgatgctcagctttttatagccgcctttttcaccaggctcatgttggactgccaacgttacagcaggggtctagacagactacgtcagatcgcagctgttgctcatagtcattccaaagaatcaggcatcatcatgatctgccagaccgagctagcatgggctgtctcgccggctattacgtcgctaca

SEQ ID NO: 2982 - DNA, 448 bp, Chlorella vulgaris
ggtcaagagttcccgggtcgacccacagcgtccacccacgcgtccggtagtcggtcatctagttagaatggcgaccgttgcgtgcagctctagggccgtggtggctggctgcagcaccaaggtggtcgctggcctgcggcccctgcccgccgtgttcaggaagcccacccccaaccagcagttcgcggctgtgcggcgatccttgaaggcagagcgcaaggctaccgccgtgcaggcgaccagcgccatggaggtggcccaggtggctgtggacactggactcatcttcggctctgcggctgtcatggtcggccttacgcttattggccttgccgtcggttttgtgctcctgcgcgtggagagcttggcagaggagggcaagatctgaggggagccttcatgcttgtccactgcctggcacaacttggcttatctgccgtgtgttctg

SEQ ID NO: 2983 - DNA, 461 bp, Chlorella vulgaris
gtacgcctctagaattcctaggtcgacccgcccgtccgaccacgcaaccgtgatcacaagttgaacagtgtggcaagtttaaatagccgtaaaacccttaccatctcagtacaaccaactaaatggctgcggcttctgctttccgtgcactggtcgactctaagcagagcaaagccgactgccaagtgcacaaggacaagctggagcagaccaagctcagagagagggaacttaaggaggcgcacaaagcagagcagcaagcggccaaggagaagaaggagcaggagcggctgaaagaggctgccctgctgagggaggagcgcctgacccatgacagcaagcgggcggccaaggaccggcgggaggctgctaagaaggaggagtacaaggagacagggcagatgtgcgagcatggggtgtggcgctgcaagctgtgcttcccgcacaagcccaccaagcca

SEQ ID NO: 2984 - DNA, 434 bp, Chlorella vulgaris
attccagggtcgaccgacccgtccacaacctttaacctctactctcagaaaccagatcacgccgccatgcagaccactgcttgcgtctcctctctccgtgcccctgccagcggcttcaagtcgtgcagggcccagcgcccagcgcgttgccttgtagttcgcgcagaggccgggaagaacctcagggagacccttctcggagcagcagctattggcgttgcatccttgctggttgcggcagggccctctcatgctggtctggacaccagcacaaccaagaagggcgaggctgcaaagatcgagtactcccgcattgaggacgagtcccccgaggctgtggtgaagaagcttaagtacgaggtgctgcccgacgtgttcaagaagctgggcgcagacgcagaccaggacggcagcacattacccaagtctgttgt

SEQ ID NO: 2985 - DNA, 465 bp, Chlorella vulgaris
  unsure (1)..(465): unsure at all n locations
attccagggtcgaccgacgcgtccgaggacgcatgggcgcgcccagcgtaagggtcgtgggtcggtgttcaagtcccacaacacccacaggaagggcgcagccaagctgcgcgtcctggacgccgcagagcgcaatggctacatcaagggcgtgattagcgacatcatccacgaccccggccgtggcgcacccctggccaaggtgactttccgccacacccacaagtacaagcacgacaaggagctgttcatcgcccccgagggtgtgttctctggccagtacatctactgcggcaagaaggccacncctgacattggcaatgtgaagcccgtgggcgacatgccccaagggtaccatcgtgtgcaacgtggaggagaaagctggcgaacgcggctcactggcccgctgctctggcgactacgccatcattgtggcgcacaaccctgatgccggcatcacccgca

SEQ ID NO: 2986 - DNA, 436 bp, Chlorella vulgaris
  unsure (1)..(436): unsure at all n locations
aattctagggtcgaccgacgcgtccgaggacgcatgggcggacgcgtggggtcnccaccgctggcaagggcacccgccaggtgacccgcgcctctgtggagtggtacggccctgaccgcgccaagttcctgggtcccttcaccaaccccccctcttacctgaagggtgagttcgctggcgactacggctgggacacctctggcctgtccgctgatcccgagaccttctcccgctacagggaggttgaggtgatccatgcccggtgggccatgcttggcgccctgggctgcgtcgtgcccgagctgctggaccgcaacggcaccgtcaactttggcgagaacgccgtgtggttcaaggctggtgccgccatctttggtgatgacgggctcaactacctgggcaacccctccctcatccacgcacagtccatcgtggc

SEQ ID NO: 2987 - DNA, 436 bp, Chlorella vulgaris
acgcgtccgagcctgcttggttgcctcgcactgtgccatgcacttgtcgtatggcacggcactatagttgcttataagacaccatcatgttagtgggtaaggtgtctgacttgatggttcggacgttggaagtggacggctcatagacttgccatgtaccatgattgccatgccttcagatgcctgctaatgcctactcttattgttcatacagtagcaggcagtgcttggttgatttaagtgaagctagagatatactagataccacttttgcaatttggtgccctcactgatctaccctctgccactctgatttgcggtattcctgcttgctttcttaagtgacgagagttgatatgttgtttgtgttcctttcatttgccttgactaccagtgagcagccttagtgtattaggctgtgcactaaattgactgc

SEQ ID NO: 2988 - DNA, 449 bp, Chlorella vulgaris
  unsure (1)..(449): unsure at all n locations
ggtcaagaattcccgggcccatccacgagtgtgatgacacttgggtgttgaacggcttcaaacttggaagcagacttttggctgcagcactgtccccagggcctggatgcggtgctgagtgacatgtgtcactggacgcatggcaactcggtggttgacgcctacaagagcctggagctggcccgctgtgcctggaccgtagctaccgggggcgatgctgcanaggcagcagaccctaacctgcctttcagcaggggcgtgctcaagccggggggcagcctggtcatgaagctgctgcagggctccggcacacatgagtttgcacaagagcttcgacgagattttgcaaaggtcgcctgacaccgacccaaagcaactcggagtgaaagtaaagacgttttcttggttggcttgaagcgcaagtagcctgatgcaacgtctgctgcagt

SEQ ID NO: 2989 - DNA, 348 bp, Chlorella vulgaris
aggcagcatcgttggcacgacggcagctgatgcagcagcggtgccagactcatagggagcgctggctggggggcatgtggcgccgcagctgacagtgcgtttggctgagtggcggttccacccccagtcggcaggttgcatatctgacggtggctggttggtcagagccaagtacgaatatgtgcgtaggttacctcatgcagcgaggggtgcagcagttcgcctcgcaggcatttgaaaacgcctcagtgtttgaccaatttaatctgcactagatctgatgttgaggttgctgtattcttgcttcggccataaggagatgcagccattttcatgttacatgcgtgc

SEQ ID NO: 2990 - DNA, 334 bp, Chlorella vulgaris
gaccgcccgtccacacagaaacacattgactttgcgctcaactcgcccttcggcggcggcaggcccgggcgcaataagcgcaaggcccttgctcgcaagggcggcgatggtggcgacgaggaggaggagtgaattgtgtgacccctccagcccacagcacagcagcagcagcaggagcacaagccgcaggctccgctgctgcggcgccagactaggcagccgcgggggcgctgtgcacgcaggcggcggcggcgcatcggggttgcagcgcagcagcagcagcggcagcgacttgttgggaggtaattatggtgtaacaaaacccgatacaaaa

SEQ ID NO: 2991 - DNA, 336 bp, Chlorella vulgaris
gtccagaattcacgggtcgaccgcacgcgtccgaggacgcatgggcggacgcgtgggcggacgcgtgggcggacgcgtgggcggacgcgtgggaaaaaaaaataaataagaaaaaaaataaaaaaaaaattaaaataaaaaaaaaaaaagataaaaaaaataatacaaaaagaaaaaaaaaaaaaaaacatttaaagaaaaaaaaaaagggggggcccccctaagggttcaaactttaattacccgtgaatggaatttaaaaccccttcaaagtggtccccaaatttcatttcaggggccttctttttaaaacttcgtaccgggaaaacccctggg

SEQ ID NO: 2992 - DNA, 450 bp, Chlorella vulgaris
attcctaggtcgacccacccgtccgcggacgcatgggcggacgcgtgggcggacgcgtgggtcacacgcgagaaggttaacggcgcaaccgtgaatgtgggtgtcgacccctccaaggttgtgatcaccaagctgaagatggacaatgacaggaagaacctccttgagcggaagaagggcggcaaggccgagggcaagggcaagttcaccgagagcgagattgttgccatggagaatgtggactgatcagcacgcacttagtgcacagcagcggcggcagcagcggcggcggcggcgcctctcgcgcttgacacagcccttcctcgcgcatgtgtgcccaggagcggcagcaaggccgccagtctgtttgcggtggctgggggtcttgcggggcaggtggaagactttgcaccggcaggggtgcctgctttggagtcttctgcacgctgt

SEQ ID NO: 2993 - DNA, 441 bp, Chlorella vulgaris
gacccgcccgtccaatagcgcacagccgcatgcttgatgtcttcctgtctctcaatcttgtacctgtgttgcccctcgtgcacaaacgccggtgtgccagccgatgcctctcgagcattacaagttttgcgatattctttagacatggctaggcacgatagaacaaatgcacgctcgcgggacccgtgcggtccagaactgccctttgattcgcactgctctgtacttaccttggagttacgtttctgtatttccaaggtgggtcctgggcagcgggcagcgggcgtttgttgaggcaggaggccttgacccttgggcggctacaagttacctttttcccagtgcccaagggctaagcgaacattggccggcggtgcttgctgtgtttgaagacagggctggtatgtcggcagtttgtgcctgccttgccggtgtaatgaa

SEQ ID NO: 2994 - DNA, 402 bp, Chlorella vulgaris
attcacgggtcgaccgacgcgtccgcaagtttccctttagtcgtgcaacttcaagtagctatcatggcctccctgaccgcctccacaaagcttgtggccgcccgccgggtgtcccttcgcacacaggccaaagctcctcgtcctatgcgcgcaacccgcctagtgtgcagggcagcaagggacgcttctgagaccctggagaaggtcaccaagatcatcgctagccagctcggcactgacgccgataaggtgaagccagagtctgactttgcgagcctgggcgccgactccctcgacgttgtggagattatcatgggcctagaggaggagtttggcattgagatcgaccaggaggatgctgccaagctcaaggacgtgcaggcagtcgctagctatattgtg

SEQ ID NO: 2995 - DNA, 368 bp, Chlorella vulgaris
  unsure (1)..(368): unsure at all n locations
ggtcgaccgacgcgtcagaccatgagtcaggactgcctcactgttgagtgactgacaacagagggttttaaagggtactgtgcgcagcaagcctcctaggcaaacttttctccgggtgtacatctgtggagaacatcgcacaggtctgtgtctgttgctcgtcctggtaccatatctgtctattgctatgtgttggatgttgcttgagaccgtagttttgttgtgaaagtatcaatacaaccttgggttttgcattctctggggtgatttgtanctggttagttggattgtacgtaatcgtataagatctcccctaaaaaaggttcaaccagcccgtgtatcaattttaccactaaaaagaaagaaac

SEQ ID NO: 2996 - DNA, 464 bp, Chlorella vulgaris
attcctgggtcgacccgcccgtccgagacaataaggcttcgttcgtcccagtgtgctcatgcagcagcactgcaagcctgaggtgcacccctttcaaggcagtcgcagcgatcacgcctccagctcggagaagcactgctgcctggcgcgcccaagcgaactctaaaaacgaggaattcccagaacgagcctctgcaactcagcccagccttatctccaacaggcggcagctgttggtttttacaggcgtggcagctgcccttgcagccagcagcactgaggcgaaagcagacataggcccagacacctggcgcgagtgtgctggcactggtgcggtgccgtgcgacatgtgtggcggcaccggcaagtggagggcactgagtaggaagagggccaaggacacgtatgagttcacggagtgcccacaatgcttcggcaggggcgtccgtgtgtgtggtgtgtgc

SEQ ID NO: 2997 - DNA, 476 bp, Chlorella vulgaris
  unsure (1)..(476): unsure at all n locations
acgcctgcaggtagcggtccagaattcacgggtcgacgcacgcgtccgcaggttgtaaaaaagcgtcgccatggcttcaaaaaggaagggcggcgttggtggcaacaagttcaggatgtcgctgggtttgccagtggccgcaacaatcaactgcgctgacaactccggcgccaagaacctgtacatcatctccgtggccggctggggcgccaggctgaaccgcctgcccgccgccgcccccggcgacatggtgatggccaccgtgaagaagggcaagcctgacctccgcaagaaggtgcaccctgcggtggtggtgcggcagcgcaagtcctggangcggaaggacggcacctacatctactttgaggacaatgcaggcgtcattgtgaaccccaagggcgagatgaagggctccgctattaccggccccgtggcaaaggagtgcgccgacctgtggcctcgtgttgctgccgctg

SEQ ID NO: 2998 - DNA, 369 bp, Chlorella vulgaris
attcaagggtcgaccgacccgtccgcggacgcatgggtgctgcctggccatgcttacaactggcgttgtcctagccatcgagtttgccaagtatggcactgaccccctgcccaaggccgtggcctctggcatcctggctgtgatctgcatcttcatctccggctttgcgtggtcctggggccccatgggctggctcatcccctccgagatcttcaccctggagacccgccctgccggcactgccgtggccgtggtcggcaacttcctgttctctttcgtcattggccaggccttcgtgtccatgctctgcgccatggagtatggagtcttcctcttctttgctggctggttggtgatcatggtgctgtg

SEQ ID NO: 2999 - DNA, 468 bp, Chlorella vulgaris
ggtacggctctagaattcctaggtcgacccacccgtccggcgttagcagccgacagccgcacaatatggcggagtcggtgcagaccttcgggcgcaagaagaatgcagtggctgtggcctactgcaagcgtggaaagggggagctgaggctcaatggctcccctctggaccttatccagcctgacaccatgcgctacaaggtgctggagcctgtgctgctcctgggcaagcagcggtttgccaacgtggacatccgcatccgcgtcaagggcggcggccatgtgtctcagatctacgccatccgccaggccatcgccaaggcgctagtggccttctaccagaagtacgtggatgagcagagcaagaacgagatcaaggacatcctgctgcagtacgacaggacactgctggtcgccgattctcgccgctctgagcccaagaagtttggcggtcatggtgcccgcgctc

SEQ ID NO: 3000 - DNA, 245 bp, Chlorella vulgaris
tcgaccgacccgtccaaacggaagatgcgtccctactgaaggcatctgagcagcttttattcagccattgcggcacagttttgggtgtgctgggattctgcatgcgcgcctgccacacgcctccccgagaagaaagagtgctcgtacacaacccccctgttctcctccgtctccgtttttcgcttgctagtcctttctgttgccgcccttgtgggcgcccacgcctgtaattgggcacacttatc

SEQ ID NO: 3001 - DNA, 418 bp, Chlorella vulgaris
ttcccgggccgacccaagcgtccacccacgcgtccgcgactggacgtgcggcagcagcgacgatggtgctgtcgtgcgacatcgatctcctgcatcctccccaggagctggagaagcggaagcacaagctcaagcgccttgtagcttctcccaactcctatttcatggacgtcaagtgccaggggtgcttcaccatcacgaccgtgttcagccactcccagacggtggtggtgtgccccagctgcaacaccgtgctgtgcgtgcccaccggcggcaaggcccgcctcacagagggctgctccttccgcaggaagggcgattagtcaggggaggcgctacgctggcatgtggtctcaagaaagtgcgccgccgcggcttgaggactcttgccagcgggacagcgcgggctatcaggaca

SEQ ID NO: 3002 - DNA, 453 bp, Chlorella vulgaris
aggtaccggtccaggattcccgggccgacccacgcgtccacccacgcgtccggatccccgtctcgcaatagttccagggcaatcactatgcaggcaaccatgatgaagaccttcggcgccagcctgcgcaaggctgtgcccacccagggcaagggcacccgccaggtgacccgcgcctccgtggagtggtacggccctgacagggccaagttcctgggccccttctctgagggctccacccccagctacctgaagggcgagttcgccggcgactacggctgggacactgctggtctgtctgccgatccccaaaccttcgctgcctaccgcgaggttgaggtcatccatgcccgctgggccatgcttggcgccctgggctgcctgacccccgagctgctgcagaacgccggcgtggccagcttccgcgacgctgctgtgtggttcaaggctggt

SEQ ID NO: 3003 - DNA, 372 bp, Chlorella vulgaris
accagtccatgagcttcttacatcaacggcagtgctgggcaatgagcaacttggaaaatcttctcatagtttcaaaactgtcaggcaaggggttcgctaccatcactttcgtgcacgcgctaggcgcctaggcatatgaagaattcgacggttttcacttcacacgaccaacggcgtccaccagtgcaaaaaggtggtgggtgaaaatcatctcataagcacaaaggggaagcatgtaggcacaaaattttgcatgaggccatgccacattggaggctcaggcccatacacaatgccaagtttatatcaaagggggggactgccaatgaaacaccgcgcctcacgacgccaatattcatatgtagcgcacac

SEQ ID NO: 3004 - DNA, 378 bp, Chlorella vulgaris
gggtcgaccgacgcgtccgacgtgcgagtagcagcgacgatggtgctgtcgtgcgacatcgatctcctgcatcctccccaggagctggagaagcggaagcacaagctcaagcgccttgtagcttctcccaactcctatttcatggacgtcaagtgccaggggtgcttcaccatcacgaccgtgttcagccactcccagacggtggtggtgtgccccagctgcaacaccgtgctgtgcgtgcccaccggcggcaaggcccgcctcacagagggctgctccttccgcaggaagggcgattagtcaggggaggcgctacgctggcatgtggtctcaagaaagtgcgccgccgcggcttgaggactcttgccagcgggacag

SEQ ID NO: 3005 - DNA, 171 bp, Chlorella vulgaris
attccagggtcgaccgacgcgtccactggagtaaagtattctgtatgctgtgtgattaggtagaaaaggggaggtgttgtgttgttgccctcaacagaatgtcctcgtcctcaggcttcaatgagtaaggcctgttggagttgctggacggggttaacaatttctgctgat

SEQ ID NO: 3006 - DNA, 411 bp, Chlorella vulgaris
gaccgacgcgtccgaccacgcatccgctgcctgcctgctgttgttgcttggctgcagctggcccatgcttcccctgggagcatagaggggggtggataaccatggggtacctaggtgggcccaatctgtccgcgtcatgctccagcagttgcttgcaccctgggagggggacggtgctcccatgcgccggggttgtagatttgctgtgtgtgtgtgtgtgacaggtgctgctgcgagcaggtgtacaccacctatgcccggagccacctgtactttgccatggagctggtggttatgcccgtcctgctggcactggtgtccaccacggcatatgccagcacgacctggtccacctggatggtagcggtgtgcatcctgtggagccccttctggttcaacccgcagaccttc

SEQ ID NO: 3007 - DNA, 383 bp, Chlorella vulgaris
tcccgggccgacccacgcgtccacgtcgacaacaggtccaaggttcacaagatgcagaccctctctgcccgtttcggcgtccgcgcccctgtctcccggggcacccgccaggtgacccgcgcctccgtggagtggtacggccccgaccgcgccaagttcctgggccccttcaccaagcccccttcctacctgaagggtgagttcgctggcgactacggctgggacacctctggcctgtccgccgatcccgagaccttctcccgctacagggaggttgaggtgatccatgcccggtgggccaggcttggcgcccttggctgcgtcgtgcccgagctgctggaccgcaacggcaccgtcaactttggcgagaacgccgtgtggtt

SEQ ID NO: 3008 - DNA, 73 bp, Chlorella vulgaris
ccaaaaggttccaagcttacttacccgtgcatgcaacgtcaaagcccttcaaaagggtcacctaatttcattt

SEQ ID NO: 3009 - DNA, 202 bp, Chlorella vulgaris
cggtctaggactcccgggccgacccacgcgtccagcaagaggagctggcaaggactgagtttgaaggcttctcagaagacgagaccgtgcgcgtggtgatgtcgggcaaccaggagccaaggggggttgacatcacagaggaaggatacagccagggagccgagaagctgtcagagctggtgacagaagccatgaaagatgc

SEQ ID NO: 3010 - DNA, 415 bp, Chlorella vulgaris
acgcgtccgcaccaaaaccgccagaatgcagaccaccttcgtgggcaccacccaggcgctgcgcgccaaggtctccacccaggccactcgtggctccaaggtagcaacctccatgcgccgcaccgtcaagtccaagaacgtgaagaccaccgacaccagccagtggtacggtcccgaccgccccaagttcctgggccccttctccgagggtgctgtgccttcctagctgaacggcgagttcgctggtgactacggctgggacaccgccggcctgtccgccgaccccgagaccttcaagcgctaccgccagattgaggtcatccatgcccgctgggccatgcttggcgccctgcgctgcatcttgcccgaagtcctgcagacgtacagcgggatcgagttcggcgacgctgtgtgg

SEQ ID NO: 3011 - DNA, 380 bp, Chlorella vulgaris
gaccgacgcgtccgcccacgcatccggttgattatatcaatcaagagctgcccagtttgccttgggtggactggccaccgatttcttactttggcgcaggtgcaggagttcactgctcaatacctcgtgcacagaaaaaagaacagcatggaggcatctctcaagagttccaagctcataccagacttgctggatggggtggcagaccacacgcagcaagtggaaatgcatgtagcctttggtgacacagaggccaaggacggcgtgctcatcccaccacccaaggcgtctcacactcccaaggtgcagatcaacgggacacgggaaactctgttcacgatgattagcagcgaccctgaccgcctgatcctgcaaaccca

SEQ ID NO: 3012 - DNA, 417 bp, Chlorella vulgaris
attcacgggccgaccgacgcgtccaagggatcatatcggcacgaaccgtcaacatgccgaagacggtcgtggttgattgccggggccatatgcttggccggctggcgagcatcctcgccaagcagctgctcagcgggcagaatgttgtctgcgtgcgctgcgaggagatcaacatctctggcggcatggtcaggcagaaaatgaagtatgagcgcttcctgaacaagcgcatggttaccaaccccaggagggctgcctacaagttcagggcacccgcccgcatcctgtggaggactgtccgcggcatgattcctcacaagaccccccgcggcgcagcagccctggaccgcctcaaggcctttgagggtgtgccccaccctacgacaacggtaagcgtccggtgatccccgatgcgct

SEQ ID NO: 3013 - DNA, 373 bp, Chlorella vulgaris
cccacacgtccacccaagcgtccggtccgtcttagccttgcacctgctgagtagggtgttgaaggacctgcccacgctcaatcaccctacagacctcgggctttctagcgtcaagtattgtgcataataactcctgagttcttgctgcaaggccaacagacagctgggagtgatggcactaaggcagctcaccagcctgtggcgctgctctgtgcctagcctggctcgggctgccagcagtggtgcaagcgcaccttcagtggcagataagattgtgacgatgaccatcgttgacaagctgggcaggcggcatattctccgtggcttggagggccagacaatcgtacatgtggtgcagcagaacagcgacatg

SEQ ID NO: 3014 - DNA, 341 bp, Chlorella vulgaris
accacgcgtccgcggacgcgtgggcggcaatcgtaatccagcgcgtagtgaggagcggactgcagttctagttaagcaggcctgcttctctctatggaggtatagacggtagccagggcatggtttcataacttgtctgtaggccttttgcctaaatccggcggtagatttgagacctgttgtgtgccccagtcagacccagactgcccttcagtctgtacgcccgccattgtgtacactagctagtcaaccgtgtgcagtgtagaagagcttggtgtaacatgtttgcctagcagtctttggacttgtggagcagaactgtaacacgatgaatccaaaaa

SEQ ID NO: 3015 - DNA, 430 bp, Chlorella vulgaris
cggtccagggttcccgggtcgacccaagcgtccacccacgcgtccgcccacgcgtccgcccacgcgtccgcccacgcgtccgggaggggcgggatgcaaggtggcagtcaactactcggcctccagcggcgctgctgaggaggttgcgtcgcagatcaaggccatgggtggtgatgccatctgcatcaaggccaactgtggcaagcctgcggagatcgaggccatgttcaaggaggtggtcgacaagtggggcactgtggaagtgctggtcaacaacgcaggcatcacccgcgatactctgatgatgcggatgaagcctgagcagtggcacgaggtgctggaggtcaacctgtcgggcgtcttcttcgccacacaggctgccaccaagattatggggcgcaagcgcaaggggcgcatcaacaacatcgcc

SEQ ID NO: 3016 - DNA, 459 bp, Chlorella vulgaris
ggtaccggtccagggttcccgggccgacccacacgtccacgcctgtgcagcaatctctgggacttgcctctgcatatactcgtcttcgtcacaagtaaaacatgcagaccgccatgtcccagagggcttttgtcgccgcacagcccgtgcgcgctgcccccaaggccacccgcgcagccaggtgcgctgtggtgctgcgcgcctccgctgaggagtctcgccgcgcagtgctgggcggcctgctggccggtgctgtggccctgaccgcgggcgccgccaacgccgccaacgacattatcgatgaccgcaaggccatcgagaagggcttcaactggacgtatgaggcacgcgacaccgacctgccccagaacgtgcgtgacggtctgacccaggcacgcgccgaccttgagggcctcaagaagcgcattgccgtcagcgagaagaagatcgacacggagc

SEQ ID NO: 3017 - DNA, 466 bp, Chlorella vulgaris
ggtctagaattcccgggccgacccacgcgtccaaccgctctcaagggctccaccgaggcatcgcagttttaagctgccggcagcttggggggtcaccagctagtgctggtggagtgctactttgacgtatggctgctgagcgggctagtaggtggtgccctggcaaccccaacccccttcaaagagggtatgaaggtggttgaggatcatgtcgcctgcacgagtttttggcgccggcagctgtcgttggtccttgatatgttcaggcaatgcatgcgtacgttttcaggcgatgcggccatgatacctgccttgcggtgtctgtgttttagtggggggattccaggtgtgagtgggacagtcgctacaaagttcagcagtgcattgatccgccttccggcagcatcaacatgccccccagtgtactaagtagtaatgtgttttgaggtacttgtgttgggttttg

SEQ ID NO: 3018 - DNA, 162 bp, Chlorella vulgaris
ttcccgggtcgaccgacgcgtccgcggacgcatgggctgtcatgttgtgcggtttcataggtgggtgtaaagtagtatgcggcaaaaaaaaaaaaaaaaaaaaaggcggacgcgggaggacgctcaagcggatgtacgcttacatacgccttcatgacgatc

SEQ ID NO: 3019 - DNA, 408 bp, Chlorella vulgaris
ttcccgggtcgacccaagcgtccagtggaagggggagagccgcaaaaatggcgtcggacaagaaggctcagaaccccatgcgcgagatccgcgtcgcaaagctcatcctcaactgctgcaccggcgagtctggtgatcgcctgcagaaggcggcaaaggtgcttgagcagctgaccgggcagcagcctgtgtttggcaaggcccgctacaccgttcgccagtgggccatccgccgtaacgagaagatctcctgccacgtcaccgtgcgcggggagaaggccgtgcagctgctggaggccgggctcaaggttcgggagtacgagctgcttcgtcgcaacttctctgacagcggcaactttggctttggcatcaatgagcacattgacctgggcatcaagtacgacccct

SEQ ID NO: 3020 - DNA, 387 bp, Chlorella vulgaris
gggttgacagcggcttccgcttcccctttgcgctgacggcgctgggctccgcaacatcaacactcctgggctgtgcggccggctaccttgggatggccccgctgaggccacacccctcgctgtccactaccttgaccaagctgctgcccatagcgctgtgctctgctgccacgctcttcctgggcaactatgcctacctgggcctgacagttgcgttcatcaacatcctcaaggcgctgacgcccgctgtcacgctgggcgccagcatgctgctgggccaggagcggctctccctgctggtcaccgcctgcctagcgctcattgcgggcggcaccgccatctccaccgcgcaggagagctccacagaccacttctcctggcttagct

SEQ ID NO: 3021 - DNA, 347 bp, Chlorella vulgaris
gtagccgtcgagaattctagggtcgaccgacccgtccagatcgttatcatctgtgaggacctagtatcaattgaaagcgcactaaccttcgaagatgtctgtctccgtggcctcgtgtaggccttttgtgcaggcctgtcggagtgtgcatataccacgcaagcatcgctttgtaccgacagctgccctgtctaaagaagtacgggagctacgcgccgtccagagcacactccttggtgcagcagctcttgcagcaagcctggccctgagtgccagtcccagcatggctgagcccaagctgccgcccttggacaccgaccctaaccggtgtgagcgggcacttgttg

SEQ ID NO: 3022 - DNA, 394 bp, Chlorella vulgaris
ttcaagggtcgaccgacgcgtccacttgtcattagcgggggccagccggtatatggcgctgttacagacaactggcccacggtggagccctatttcaatgagaccggcagcaattcgccctcaatcctgcccacctaccagcagagggagctgctggacctggcggtcaagagcgtgcaggccctgggctttgtcacgggtgtgttccatgtggagtgcaagtacaccagccgcggcgcgcggctgattgaggtcaactgccgtatggggggcggcccggtgcgcaacatgaacctgctggtctggggggtggatcttgtggaggagcagctactgtgcacgggaggcattccctctcgaccgcctgtggctgcaaagcctttgatgaacattg

SEQ ID NO: 3023 - DNA, 92 bp, Chlorella vulgaris
gtccaaaaaaaaaaaaaaaaaaaaaaaaaaaaaaaaaaaaaaaaaaaaagggggacatacaaaaaagtatcaaaaaattagaataaaagtaa

SEQ ID NO: 3024 - DNA, 392 bp, Chlorella vulgaris
attcacgggtcgacgcacgcgtccaggagttttgagcaggcaagtggccgcctccctttctctctttcatgcatgtgtgcctcaggccgcatatatataatggaacctgtgtgcgctacatatgaatattggcgtcgtaaggcgcggtgtttcattggcagtccccccctttgatataaacttggcattgtgtatgggcctgagcctccaatgtggcatggcctcatgcaaaattttgtgccaacatgcttcccctttgtgcttatgagatgattttcacccaccacctttttgcactggtggacgccgttggtcgtgtgaagtgaaaaccgtcgaattcttcatatgcctaggcgcctagcgcgtgcacgagagtgatggtagcgaacccc

SEQ ID NO: 3025 - DNA, 407 bp, Chlorella vulgaris
gacccaagcgtccacggacgcgtgggcttaaacacgattggttatggactgtgtggtgctgggagcgagttgagtttactcctcctgtgtgcactggggctccctaatcccaatccccatgtgcactggttggacgggttttgggagtttcccgtctgacacccatgcaccccagccccagatcgaaccccggccgatatactagctgggcggcttggagttaaggcgcccaagttgaggattcaagcctccatatccatgaaagcgagggctagcgagccatgtgatgaaggggtggcggccagctagcagcgctcgagtggtgcatgccattaaaccggtcagtgtcagtgtgtcaatcctagctgtgatttcaagacccaaggtcgttccattgtggtgggaat

SEQ ID NO: 3026 - DNA, 455 bp, Chlorella vulgaris
ggtaccggtccaggattcccgggccgacccaagcgtccacccacgcgtccggctgcctcgcgtgaggtgctgtctctggcaggcgtggggggagcatcacccgacgcacgagccgccacacacctggcagcagatgcgccggctgctgctgctggcgccaccgccaccgctgcccctgtagctgtagctgcagcagagcgattgcaggctattaatgcgctaagcgaggggttggtagagggctgcagttggttagtggcagggcgcttggacgagctgcggggctgcctgcaggcggtgctgctgcagggcaggcgccgtgcctggtttgccaagcatgctgaggcggtggtgcgcagcgtgcagggcatggtgcagcaggagcatgggtgggagctgcgccttgacagctggctggaccggggttgagggctggctggatgccgtgatgcccg

SEQ ID NO: 3027 - DNA, 455 bp, Chlorella vulgaris
cggtctagggttcccgggtcgacccacacgtccacggacgcgtgggcggacgcgtgggggcggcggaaagcaccaagatggcgaaggacaagtctcgctccgccgaggtggtgacccgcgagtataccattaacctgcacaagaggctgcatggcataaccttcaagaagagggctcctaaggccatcaaggagattaagaagtttgcccagcaacaaatgaagaccagcgacgtgcgcgtggacgtcaagctgaacaaggccgtgtggagccagggcatcaagaacgtgcccaaccgcctgcgcattgtgatccagcgcaagcgcaacgaggacgacgacgagaaggaggagatgttctccctggtcaccctggccgaggaccagagcagcaagggcaagggcgtggtggtcctggaggcataaacacacacacgcgcctcgcggggggagctg

SEQ ID NO: 3028 - DNA, 456 bp, Chlorella vulgaris
ggtctagaattcccgggccgacccacgcgtccaccctgtctaccagggtaacccatcagcagggattgaaggccaagaacaatggtcaggcacaacaacgtggtgcccaaccagcacttcaggaagaagtggcaggacaaagtcaggacctggttcaaccagcccgctcgcaagctccggaggaggaatgcccgcgccgagaaggccaagaaggtgttcccccgccccaccgcgggcgcgctgaggcccatcgtgcacggccagaccgtcaagtataacatgaagaagcgcgcgggccgcggcttcacgctggaggagctcaaggaggctggcattccctccaagcttgcccccaccattggcattgcagtggaccaccgccgcaagaacaggtcccttgaggggcttcaggagaatgtgaaccgcctgaaggcctacaaggccaacctggtggtg

SEQ ID NO: 3029 - DNA, 342 bp, Chlorella vulgaris
ttcaagggtcgaccgacgcgtccaaggacgagtgggcggacgcgtgggctgagaacgcggtggactcccttaaggacaaggcctctggcttcaacatcaagtctgtgggtgatgccctgaagaacgaggcgagcgctgaggccgacactgtcaaggccaaggcctccaacccccttaagtcggtggcgggtgctgcggacgatgccaagtcccggctggagggtggtctggatggcgccaaggacaagctcgggtcctctggagatgtgctgaagggcaaagcctcgtctgcttcttcaaacgtcaagaccatcgctaacccgggcagccctgccaccaccg

SEQ ID NO: 3030 - DNA, 415 bp, Chlorella vulgaris
gaccgacccgtccagtgatcaactgttatcgtgctcactgtgcacgagctggtaaccatggcaggagacgatccgcacgatggcgaggcaaccacagagaattggcgagactcggatacccatcttgtggtccaacagcctgagggctacttctgcaccctgagcatgctggccagggtgcctctgccaccatccaaagtcttccagattctgacggacccagacaacgcccgcatcttccaggccatcaaggctaacctaagccggcgtgtggtgtggaatgacggcaacggcaagcagctggtggaggtggagcaagagtgccgctggcggttcctcattttccgaggcacctttgtgaacaagatgttggtggaggaggacaaaaacaaccactcgatctgcgtgaggctgg

SEQ ID NO: 3031 - DNA, 288 bp, Chlorella vulgaris
gacccaagcgtccagctaactagggtctgtgggctgttcatcagcaggcaagcaacgagtccctgagcaaaacttgtgcgtgctctgctgggggagcgtacctagtgctgccggtcttgtgatctccggagcctcattctgccaagctcggagttatgagtggggcagtgcgcctctgctgcaagcgctgcgtgttgtacttgtcgcttgtgttttgccggattttattttctgctgagacatttctgttcccgctcaacaagctttttgtaacacatggtccctgct

SEQ ID NO: 3032 - DNA, 442 bp, Chlorella vulgaris
ccgggccgacccaagcgtccacaagacttactatcagctgcatttcagccagtagaacagagcagtcatggcgtcccagctgcttgccacccgccctggcctccgtgtggcccctgccaccagcactcgcctgagccgccgctccgttgttgtgaaggccgccaacctgagcaccatcgagaagcagtacaaggagttcagggtcccccagatccctgtggccaccgtgtttggcattgccggctggctggtgcccgctgctagccccgcccctgccttcggcggtcgctctctcctgagtgtgttcaccgagagcatcggccaggagctttcccacttccccaccggccctgctctggactcccagttctggctctacctggccattttccatgttggcctattcgccaccatgttctttggtccgattggcgtcagcgct

SEQ ID NO: 3033 - DNA, 452 bp, Chlorella vulgaris
ggtctaggattcccggatcgacccaagcgtccacccacgcgtccgcccacgcgtccggaacatacggtgttagtcccgtttgggttaaagttgctttcaccgtccgccagaacacaaaatgaagctggtcgctgcttacctgctggctactctgggtggcaaggatgcccccaccgccgaggacatcaagtccatcctgtccagcgttggtgctgaggccgatgaggagcgcctgagcaagctgctttctgagctggagggcaagaacatcaacgacgtggttgcctccggcctgtccaagctggcctctgtgcctgctggcggagttgcctcttcgggcggtgctgcccccgctgctggcggcgctggcgctgctgaggctgctgcccccaaggagggggagaaggttgaggaggaggaggaggaggacatgggcttctccctattcgact

SEQ ID NO: 3034 - DNA, 435 bp, Chlorella vulgaris
cgggtcgacccaagcgtccagagcaagcctgctgtggccctcgtttccaccgaccccacctggatcctgttcatgaagctgcgcctggaccgcgtcctgaagctggaccttggcaagatgagcctggacgaggtgaccaagtctaacggccccgtcaccgagctgaagcctcaggagaagtggattgccccttaccagccgtacgcacatggctggtggaatgtgtttgagcgcaagtgaagcgccccttgcctgccgagtgcgtgtgttggcggaagtgcggggggaacagagacgcagcgttggtcacatggcgcgccgtgccccctgccttctccgtgcgtgaagagaagttagtcccacttttgcccatgggggtttttcagttgagcagcagtgaatgtgctcgctcggctgtgaatttggtgtgttgtg

SEQ ID NO: 3035 - DNA, 410 bp, Chlorella vulgaris
ggtcgaccgacgcgtccgaggacgagtgggcaccccgcgcagcccagatgatacccaggatagggggactgaggtgatcccagtggggcttgacgagcccatggacaagagcaaggtcccagagccctcagtgtatggggctgagaaggtgcagtcgtctgacgacatggaaccgcttccagatagacggaacaagtgccggcagagtagcgagagtgatagtgggccgctgccagatagccagcgggcgcctcaggagggcgacaagggtggcaaggaggacttgggtttaaaacgtacaggtctggaggagccctaggtatggcgtagattgttcctgacaggaggttgccagtaggttcgctatggggacgggcgtgcctgccgtagttgttgcgcaagcttggatg

SEQ ID NO: 3036 - DNA, 163 bp, Chlorella vulgaris
acccacgcgtccgcggacgcgtgggaaaaaaaaaaaaaaaaaaaaaaaaaaaaaaaaaaaaaaaaaaaaaaaaaaaaaagggaggacgcactaaaggttaaaaacattaattagggttgaatgaaatgtcatagttcttctatattgttacctaaatttaatt

SEQ ID NO: 3037 - DNA, 365 bp, Chlorella vulgaris
gacgcacgcgtccaaccacgcgtccgcccacgcgtccggctgtgtgttaagtgtggttgtgtggtgcgtgtgcggcgtgtgggtggtgccctagtgggctggcttgcatgttgtcactctgttgtttcttacgtctgttgatagataacaactggcagcagtgctagtcttgtctggtttatcagcggaagatccgtgtgttgggctaggccatggtgtgtgctatcgcggcctccttgcgggagggcttcaatggcagagctcgtctgatgcagacagacaaccatttgtgcaagtggatcctgctcaaaaaaaaaggaacaaaaagaagataacgcaaggatgccacatacgccagcacaagt

SEQ ID NO: 3038 - DNA, 431 bp, Chlorella vulgaris
gacccaagcgtccacccacgcgtccgcccacgcgtccgcccacgcgtccgcccacgcgtccgtctgcttcagccagcctttgcaaaggttcctcgaagtctccacaatggccgccgctatgtgccagacctctgttgcccgggccttcgcccctaaggtggctgcccagaagcgccagcgcgctgttgccgcccaggcctatgttggcaactggctccccggcagcgaccgccccgcctacctggagaagctccctggtgcctacggctttgaccccctgggcctgggcactgagcccaagagcctggagcgctttgtggaggctgaggtgattaacggccgctgggccatgctgggcgttgccggcatgctcggcgtggaggccctgggctacggcgactggtacagcgcacccctctgggccgtgactg

SEQ ID NO: 3039 - DNA, 463 bp, Chlorella vulgaris
ggtaccggtctaggattcccgggccgacccaagcgtccacggacgcgtgggctgtcatcgatcttctcgtctgacttgcacatccgagctcgctgccttgcttggtggccaacctgggcgccatgctgcagcaaatagcgggcagggtggcacccaggctgctggcagcgccaccactatcgttcgtgtctttgatcaacgggttccacaccagcccggcagcacaaggcgtgggcatccctgagcgcaagcttgacagcctcgaccccgagcagccggccatgagcgagcaggagttccagacgtcgcagcgcgagcctcccaaggacctggcgggcatgctggatgagtcagcccagacgctgttcctaacagagctgtggcgggggctggccctcaccatgaaagtgttctgggagcccaaggtcaccatcaactacccgtttgagaagggccccatcag

SEQ ID NO: 3040 - DNA, 456 bp, Chlorella vulgaris
cggtccagaattcccgggccgacccacgcgtccaggagcggctggcaacatggcgaccgagattaagttgttcggcaagtggagcttcgatgaggtggaggtgaacgacatctcccttgaggactacattgccgtgaagcccaagtatgcgcgcttcaccccccactctgccggccgtttccagaagcgccgcttcaggaaggcgcagtgccccattgtcgagaggctgaccaactctctgatgatgcacgggcgcaacaacggcaagaagctgatggcggtacgcatcgtcaagcacacctttgacatcatcaacctgctcaccgaccagaaccccatccaggtcctggtggacgccatcatcaacggtggtccgcgtgaggatgccacccgcattggctccgccggtgtggtgcgccgccaggctgttgatgtgtcgccgctgcggcgcgtgaa

SEQ ID NO: 3041 - DNA, 388 bp, Chlorella vulgaris
tagcggtctagaattcacgggtcgaccgacgcgtccgcgtgtgtcggcgggcagagcgcagcgtggtgcctttagtaagggagggcctcactgacgaggcagtgggagtcttcctaaaccgcctatcagactacctctttatggcagcgcgatatgcggcaatgaaggctggggagccagagactttatggaagaagtcaagctgaccgagctgtgggatgctggttgtgctccctctgggagcctgactgatgcaatattagcatgggtgggaggtagtgcgaacacggagtgagttaagctggactgacacggctggatgcacaatgtgcctgagtcttgccaatattgcctagtaaagtctttggtgccgctcgcgttcagcaaa

SEQ ID NO: 3042 - DNA, 432 bp, Chlorella vulgaris
cccgggccgacccacgcgtccagccaagctgcgcgtcctggacgccgcagagcgcaatggctacatcaagggcgtgattagcgacatcatccacgaccccggccgtggcgcacccctggccaaggtgactttccgccacacccacaagtacaagcacgacaaggagctgttcatcgcccccgagggtgtgttctctggccagtacatctactgcggcaagaaggccaccctgaccattggcaatgtgaagcccgtgggcgacatgcccgagggtaccatcgtgtgcaacgtggaggagaaggctggcgaccgcggctcactggcccgctgctctggcgactacgccatcattgtggcgcacaaccctgatgccggcatcacccgcattaagctgccctcgggcgccaagaaggtgatcagcagcgagtgccg

SEQ ID NO: 3043 - DNA, 401 bp, Chlorella vulgaris
ggtcgacgcacgcgtccagttgtgacattggtaatcaagcagcctagcatcgccgccccaagcaatcgctttccttctccaggccccgcagcgcagcacaccccatgggagacgacttttacgtgcggtactacgtcggtcacaagggaaagtttggccacgagtttctggagtttgagtttaggcctgatggcaagctgcggtacgccaacaacagcaactacaagaatgacacgatgatccgcaaggagtgctttgtcagccaggcggtgctggacgagctcaagcggatcatacaggacagcgaggtggtgaaggaggacgatgccaactggcctccccccgaccgcgtggggcggcaggagctggagattgtgctgggcagcgaccacatctccttt

SEQ ID NO: 3044 - DNA, 267 bp, Chlorella vulgaris
caaaaaaaaaaaaaaaaaaaaaaaaaaaaaaaaaaaaaaaaaaaaaaaaaaagaagaaaaaaaaagggggttcggtcatatgggtttgcgtgtttgcgtaggtgtttacgcttctttaggggttcttctattttgtttccttgggttgtgtttttagagtgtcgtttttagggattcgggtggggttaacccctttagttatctagtttaatatctttgtttcacatcctgctttcgtaagctggtggcctgcccatttggccgttc

SEQ ID NO: 3045 - DNA, 462 bp, Chlorella vulgaris
ggtctggaattcccgggccgacccacgcgtccagccgaggcagcctacgacgcagccaagggcgcgctgaccaagtggaacgcgggcgtgggctactccgccgccgacttccaggccgccgtgttcctgaacgacttgaacgtggtcaccggccagtacgcgcactcagtcaccgccaccgccaccgtgggcgctgaggtggcgcacaacctcaccagcaaggtcaccacattcagcgcaggcgttgccaagaggctggaggctggcaccctggtgaagggcaagctggaggacaatggccacgtcagcgtgctgtacgagcaggaggtgcggcccaagaccaagatgggcctcagcgcgcagttcgacgccctcaacctggacaaaggcgccaaagttcggcttcgcctacgacctcaagtactgagggaagagaggggagcggtccatggcgcagttatg

SEQ ID NO: 3046 - DNA, 386 bp, Chlorella vulgaris
agaggggaaggcggagggcgccaagctgctgacgggcggcaagcggccggcgcacctgaggcagggttacttcctggagcccacagtctttatggacgtgcaggcccacatgcgcatctggcgtgaggagatctttggcccggtgctggcggcgcgcacgtttggcagcgaggaggaggcggtgcggctggccaatgagtcagagtttgggctgggcatggccgtcatctcggaagacaaggaacgctgcaggcgcgtgtctgaggcgctggagtgtggcatggtgtggatcaactgctcacagccctgcttctgccaggcaccatggggcggcgtcaagaacagcgggtttgggagggagctggggccttttgggctggacaact

SEQ ID NO: 3047 - DNA, 457 bp, Chlorella vulgaris
ttcccgcgcccacccacgcgtacgacgcgtgctcagcccagaggccgtcgatgatgctgccgtggtggctgctggcaactctgccaggatctcgactggcggcgtgtacaaccagagcagcgaagatgtggagagggcaattctgggcagcggccacagctcggtgacgcgcaccgccactggcaacatgcgccacgtggaggtgtcgcccacccttgcagaggcgtgaggtggccatctaagccatctaaaggctatgtgtggtgccagcgtctgtgcagcgttagtggtggccagcaaggctgaatgccaaggtggaacttgcttgcctgcatgcccaatacccccgaaacagtggtcaaggaggttgagtgtggcaggcctcccttggaactggacggctgagaagcccttcagcgtctttaactttcaacgtatcccctgcgaagcaagggaa

SEQ ID NO: 3048 - DNA, 431 bp, Chlorella vulgaris
cccacgcgtcagacaacatcaactccatcatcgcaccagccctcattggcatggaccccaccaagcaggcggaggttgacaagaagatgatcgagcttgacggcaccgagaacaaggccaagctgggggccaacgccatcctggccgtgtccatggcggtgacccgggccggcgctgccgagaagggcgtaccgctgtaccgccacatcgctgacctggcgggcaacaagaagctcatcctgccggtgccctccctcaacatcatcaatggcggcgtgcacgctggcaacgctctggccttccaggagttcatgatcatgcccaccggcgcaaccagcttcgcagagtccatgaggttggcggccgaggtgtaccaccacctgaagaacatcatcaagaacaagtatggcctggatgccgccaatgtgggc

SEQ ID NO: 3049 - DNA, 415 bp, Chlorella vulgaris
cgcgtccgatgagcacgctccagagctccaccattgcggcactgcgagcacctcacgaggctgcaatcgctgccgaccaggtggcactggccagccgcctcagcgcctttgtgcgtgggggccctgccctcggcagtggccgtgcccgctcccccagcgggtcgaccggcagcctgagcagcctgacggctgccgatggcgcacccggcgccacgccagcaggagccgtcgaagctgcctctgctgcgtctggcaagatgctaatcagtggcatgcggccggtgctggcgccgcaggcaccggcaccgtatcagccccgtgcattgggcagccctcctgagctgcttcaggtggcgtcgttgcgcctgctcctggctggcgccagcgctcgctgaggtgctggctgccgtcggtg

SEQ ID NO: 3050 - DNA, 408 bp, Chlorella vulgaris
ccacgcgtccgaccacgcgtccgggccgccggtgcagccaagaaggccgttggcaacgccaagaaggtcgcctctggcaccaccaagggtggctggctgggcactgacagcaacaacatcgacctggacaggtggtacggccctgaccgcgccctgtacctgcccggtggcctgctggaccgctctgaggtgcccagctacctgaacggcagcctgcccggcgactatggctacgacccccttggtctgggcaaggatggcggcctggagaagtaccgcgccaacgagctgctgcacgcccgctgggccatgcttgccgctgctggcgccatcatccctgagggccttgccgccaatggtgccgatatcaagggcgccacctggtacgagaccggcgctgccatgctc

SEQ ID NO: 3051 - DNA, 381 bp, Chlorella vulgaris
cccacgcgtacgagaaggcagtgcatctgctgaggaccgaaacggacaaccatgcagattttctgcaaaacagacaggactcatgtccttgagcttagctccgaggccactgtggccgatgtcaaggctgccatcgaggccagccagggcatcccctgcgatgcgcagcgtgtgatgttctctggtcgccagctggaggaggaggcctccctggccgcctgcggcgtgtctgacgacagccagctgtacatcctgatgcgcctgctgggtggtgccaagaagcgcaagaagaagacctacaccaagcccaagaagcagaagcacaagcacaagaagatcaagctcagggtgctcaagttctacaaggtagacgacagcggc

SEQ ID NO: 3052 - DNA, 379 bp, Chlorella vulgaris
ccacgcgtccgacacgcgtccgggaacagctctttgcctcaagagagcttctaatatttttagtgagcggcaggcttgatcaccatgttgcagctgggcctctgtagtacgcacctacgcttgccagcccctgtggccgtcagaagtcccacatgctgtctattgcgagcacagagcgtgcgtggctccccagtaaggctccaacccctgccccagcgtccgcttcatctagccaacgcctctgactcctctggaccccacacatcaccttctgtggacgaagaatccgaggatgaagaaactgatattgtgctacagccagaggaagactgggtggtgcccggcacgatggctgatgctatgaaggccggtactaagc

SEQ ID NO: 3053 - DNA, 233 bp, Chlorella vulgaris
attgacaggggtggacgcacttatctctgttttgtggcctttgatgatttgcccgtacgttctcatcttcatgccttttgtggaggtacattcttgcctggcttgcatgctgagtttcgagccaggcccatgtagtaccggtgagactccttgttgtaccactgttatgtcctagtgttgcttgaggcctgcgctgacactgtgaagtcttgatagtataaaaaaaccaaaaa

SEQ ID NO: 3054 - DNA, 361 bp, Chlorella vulgaris
  unsure (1)..(361): unsure at all n locations
ttcccgncgtcacccacgcgtcagaggacgcgtgggcggtctgcctgtttgtggggttcccccttaaagtttgcattcaggcaccaaccaaaaatgtccaagtctgagcttgcctgcgtatacgccgccctgatcctggcggatgagggtgccgatgtcagcgccgacaacatcaccgcaatcgtgaaggctgcgggtgtggatgttgagccctactggcccggcctgtttgccaagctggccgagaagaagcgcatcgaggacttcatcgtgaacgttggcgccggtggcggcgctgcccctgctgcgggcggtgctgcacctgctgccggcggtgccgctgatgccgcccccgccgcca

SEQ ID NO: 3055 - DNA, 426 bp, Chlorella vulgaris
cggtcccacgtccgggtcgaccacgcgtccgagcaggagtcagggcggagcggttgctgtcttcaggaccgcacacagccaagatgaatgtggaaaagctgcagaagatggccgggagcgtgcggacgggcgggaaggggtctgtgcggaggaagaagaaggcggtgcacaagaccacctccaccgacgacaagcgcctgcagaacacgctcaagcgccttggggtgaacaccatcccgggcattgaggaggtgctgctgctgaacaacgacggcaccgcgctgcagttcaacaaccccaaggtgcaggcgtccatcgccgccaacacctatgttgtctccggccccgcgcagcagaagcgcgcccaggacgtgatggcgcagatgcttgcgggcatgggcggcatgccgggcatggcgtccatga

SEQ ID NO: 3056 - DNA, 396 bp, Chlorella vulgaris
ttcccgcgtccacccacgcgtcacgagttggtggagaccctgcccatcagcagccatgggtatctcccgcgactcgcttcataagcgccgggcgacgggaggcaagcagaaggcttggcgtaagaagaggaagtatgagctcggccgccagcccgccatgaccaagctgtcctccaacgtgacagtgaggcgtgtgcgcgtgcgcggaggcaactctaagttcagggcgctgcgcctcgactcgggcaacttctcctggggctccgaggccgtgacccgcaagacccgtatcctggatgtgtcttacaacgcctccaacaacgagctggtgcgcacccagaccctggtcaagaacgccatcatccaggtggacgcaacccccttcaagcagtggta

SEQ ID NO: 3057 - DNA, 393 bp, Chlorella vulgaris
cggtcgtacttccgggtcgaccacgcgtccgagcactgccatgctgggccgagcacagctctccctgcacaggtgctcgcagcagcagcagcagcggcggcctgctcatgtgctcctcacttctgtctctgggcatggctagctcgaagtggtcgtggtcctgtcgggtcttgcgtccacctgtttgttgtacaacaggggctgccgaggagtactctttccatcggcgcccctttctcttgccgtagggagttccggtcatcccaatctcttttagcgtgcaggcatgcgattttgtggcccttggcgggttgagggtagtgacaactgagaagaatatttcatacagcatttgtgtaactcgcagcgaccaaaaaaaaacgacaatacaag

SEQ ID NO: 3058 - DNA, 71 bp, Chlorella vulgaris
taaaggatccaagcttacttacccttgcatgcaacttcatacctcttcaaaagtgtccccaaaattcaatt

SEQ ID NO: 3059 - DNA, 397 bp, Chlorella vulgaris
tccgggtcgaccacgcgtccgaacacgcgtccgggaaggcagtgcatctgctgaggaccgaaacggacaaccatgcagattttctgcaaaacagacaggactcatgtccttgagcttagctccgaggccactgtggccgatgtcaaggctgccatcgaggccagccagggcatcccctgcgatgcgcagcgtgtgatgttctctggtcgccagctggaggaggaggcctccctggccgcctgcggcgtgtctgacgacagccagctgtacatcctgatgcgcctgctgggtggtgccaagaagcgcaagaagaagacctacaccaagcccaagaagcagaagcacaagcacaagaagatcaagctcagggtgctcaagttctacaaagtagacgaca

SEQ ID NO: 3060 - DNA, 386 bp, Chlorella vulgaris
cccacgcgtacgagcgctttctcgcttggatttgtctagcagctgcatcggcagcctgcctagccagctctcacacctggctaatagtttcagttgagggtctgggagaagtcggccctcggactcccggcctcctcaccatatgacggtcagttgttgtcctcggcatgtaacaggtactgtagtcttactgcgttattgctctggttactgcacctctatgcctttctcggtgacttggcctggctccgtttcttgcaagctatttcattgattgcttgacccggggccattttcgccggaatgcaatgacctttctttgtcctccttctttcgacatgtgttccatctgattgaggccttgcccgtgagttgtgggtcctgtg

SEQ ID NO: 3061 - DNA, 80 bp, Chlorella vulgaris
aaaaggttccaaacttaactaggggtgcaaacaaagtcataaacccttctagggggtgccccacattcagttcaaagtta

SEQ ID NO: 3062 - DNA, 349 bp, Chlorella vulgaris
acgcgtccgacaaccgtccgctcgtgcgtccactattgtgcctgtaatgataggtcataccattgctgtacataatggtcgtgaacatattcctgtgttcgttacagatcaaatggtaggacacaaattaggggaatttgctccaacacgcactttccgtggtcatgtgaaaaaaaaaaaaaaaaaaaaaaaaagaaaaataaaaaaaaaaaaaaaaaagaaaaaaaaaaaaaacaataaaaaaataaaaaaaaaaaaaaaaaaaaggggggccgtcctaaaggttccaagcttacttagccttgcatggaacttcaaagctcttcaaaagtgtccccaaaattcaatt

SEQ ID NO: 3063 - DNA, 396 bp, Chlorella vulgaris
  unsure (1)..(396): unsure at all n locations
acgcgtccgagacacagngccagggtaacactggtgcttacaacagcggctctggcaacactggtgcctacaacgacggcgagggcaacactggatataacaacaatggccagggcaacaccggtgacaacaatgtcggccagggcaacaccggcagcggcaaccaaggcaacggcaacaccggcagcagcaacaacggcgacggcaacagcggtgacaacaatgttggcactggcaacaatggcagcaagaacgttggcgagggcaacaccggctatggcaacgttggtgcaggcaacagcggcaacagcaacgttggtgcgggcaacaccggtgaccagaactatggctctggcaacaccggcagcaagaacaatggcgagggtaacactggca

SEQ ID NO: 3064 - DNA, 417 bp, Chlorella vulgaris
gtacggtcatccattcccgcgtccacccacgcgtccgagagaagaagactcctggatctcaaccgtgctggcagcagctcccgcacgacctctcacccaccagtcctagcgaggttagcaggggttcaccatgaaccaggcaatctatgtctctctgtctctcattggcctggtggccattgtgggagctggtgttggtgttggtagcggcgtggcactgatcagccagcagccgcaggcgaagactgagccaaccaagcactgagtggttagttgctgtggcatacagcagcggcagcagcagcagcagctagtgctggctagcttggggaagttgcagcttttgcaaaggtgcctggccgtgtgcctacctgacggcccgggtttgggagcgcgagtgccagttctttgccaatg

SEQ ID NO: 3065 - DNA, 365 bp, Chlorella vulgaris
cccacgcgtacgaggacgcgtggggcagcctgctacccacggacggtggctccctgctagtgagcatggcaagaagcctgcttgaggagggctttgggcccagacagcaggcgttagggccattgcgacccaccaggcgttcacgtggtcccgttgattctgctgatgggtagcttgggttgtgggtggtgcagggtggacttagcagcggtcaggcggacttggtgtcggtggttatgttaggcgttaggggttgcgtcacacgccgcacccagtaggaagggagtgtctagggccttgttgaccagcccccacaacacaatggtggtgtgtgctgcactgtctgtcacttggaactgttgttc

SEQ ID NO: 3066 - DNA, 400 bp, Chlorella vulgaris
ttcccgggtccacccacgcgtcagattccagggcaatcactatgcaggcaaccatgatgaagaccttcggcgccagcctgcgcaaggctgtgcccacccagggcaagggcacccgccaggtgacccgcgcctccgtggagtggtacggccctgacagggccaagttcctgggccccttctctgagggctccacccccagctacctgaagggcgagttcgccggcgactacggctgggacactgctggtctgtctgccgatccccaaaccttcgctgcctaccgcgaggttgaggtcatccatgcccgctgggccatgcttggcgccctgggctgcctgacccccgagctgctgcagaacgccggcgtggccagcttcggcgacgctgctgtgtggttcaa

SEQ ID NO: 3067 - DNA, 418 bp, Chlorella vulgaris
attccggcgtccacccacgcgtccgacaccacccagcaacgatggcctccaccatgacctgcaccgccctgcgcgcctcggttgccaggagggctgccccggcccgccgcggtgccgtgaaggtccaggccgcggccaagcagatcccccactggctgcccggcaccccccgcaaggactacctggatgccgctgacctgccaggcaacttctcctttgaccccctcaacctggccaccaaccccactgcgctcacctggttccaacaggcggagctgcagaacgggcgctgggccatgctgggtgttgccggcatgctgaccccggagctgggtgccaagctgggcggcttcaccggccccgccggcagggtgccatggtatgatgtgtccaactacgacttcggggcccccggccc

SEQ ID NO: 3068 - DNA, 254 bp, Chlorella vulgaris
cgcgtccgattatgttccttaattccttgtgtatctgattgttgccaaccttgggacgtcaacaagggctttgacataagagggtcacccttggctggtaaaaggaaagccaaaaatgacgagcaggacaacaaacatggacgtcaaagtcaggaggcatcccgcctggaaggaattcgcctagcacgggatcagtttgacgaaaggaccttcttccgcttgaggaacttttgtaagtgccaaagctgccaaaa

SEQ ID NO: 3069 - DNA, 434 bp, Chlorella vulgaris
cccacgcgtccgactcgaagtcgtgcttgatgcttgggcatccaggccagcacatcttcactaccggcaacccatcagcatgacaaccttgcacagtatgtcgagcaaagtccaaaacccgccagcaccgaacggcagaacggccaggcgtagcccggtgaggcggtgggccagcttgcgacctctgcagctcaggttacgggctagctatggaggtccagagcgagaaactttgcggccgaacctgccagtcccagcagcacctccaaggggagtgccacctccaccaccaccgcctccacccccgcccccaggccaggcatcggcggttgcaaggcgcgccctggtagtaggcggcctcctggtgggaacggcgttaggggtatcagccttgaaaggcattgttggcagccgcggacccagctccaaggatc

SEQ ID NO: 3070 - DNA, 440 bp, Chlorella vulgaris
  unsure (1)..(440): unsure at all n locations
attccggggtcgacccacgcgtacgagaagggggaccatgaccaccaagcgcaggaaccatggaaggaacaagccagcgggcgcccgtggcaaggtgaagcgtgtgcgctgcgagagttccgccgccatggtccccaaggacaaggcagtgaagcgctttgtggtgcgcaacatcgtggatgcctctgcactgcgcgacatccaggatgcacaggtgtacaacgagtacatgctgcccaagatatacaggaaggtgtactacagtatctccgccgccatccactcccgcatcgtgcgcgtgcgctcccgcaagaaccgccgcaaccgcgagccgcccaagttcgtgcgcgggggaggcgtcggcgccgcacgtggcggctaccagaggcctggcggcccccagcagcagtgattgagtgccacaggtagntgccgctggg

SEQ ID NO: 3071 - DNA, 443 bp, Chlorella vulgaris
acgcgtccggtatgagatgaagtctcaggtcagcgtgcagaaggcttccttcgcgaagccggccctcaaggcctcctgctccaagcgggtggcagtggctcgccccgtgagctgctctgctcagaatgagaaggccaccgccgtggctgccgccgctctggccgttgcccttggctttggccaggttgacgctgcctatgccgacgttgcaggcctgaccccatgcgcggagagcaaggccttcgccaagcgcgagaagaatgaggtcaagctgctgacaaagcgcttgaagcagtatgaggccgactctgcgcccgccctggccctccaagccaccattgacaaaacccatgcccgctttgagaagtacgccaagcagggcctgctgtgcggcactgacggcctgccccacctcattgcggaccccggccttgcgctccgct

SEQ ID NO: 3072 - DNA, 428 bp, Chlorella vulgaris
ccgggtcgaccacgcgtccgaaaacttctcgtctgacttgcacatccgagctcgctgccttgcttggtggccaacctgggcgccatgctgcagcaaatagcgggcagggtggcacccaggctgctggcagcgccaccactatcgttcgtgtctttgatcaacgggttccacaccagcccggcagcacaaggcgtgggcatccctgagcgcaagcttgacagcctcgaccccgagcagccggccatgagcgagcaggagttccagacgtcgcagcgcgagcctcccaaggacctggcgggcatgctggatgagtcagcccagacgctgttcctaacagagctgtggcgggggctggccctcaccatgaaagtgttctgggagcccaaggtcaccatcaactacccgtttgaaaagggccccatcaaccc

SEQ ID NO: 3073 - DNA, 372 bp, Chlorella vulgaris
gtaccggttcaggcattcccgcgtccacccacgcgtcagatcaacaggggccatgtcttctttccgtgtggttggcataacattgagcagcagttgcctggtgtcagcttgagtcccggcctgtaccagtaagtgagttggtaaaactgtccctcgtgcaaggggttgcagttgcctgggatttgaattacctgctcagtgtggcgcttgaacagcctaggcgttgccctgtagcttggccaatggcagatgcacaagtgggtacctgaaggacaatgaaatggagatgcctctggtggattggtaccacctgtagtacagattcgcgacgcaaaaaaaattatcaaagaaaagctataaaagaagcaaaca

SEQ ID NO: 3074 - DNA, 446 bp, Chlorella vulgaris
ttcccgggccgccccacgcgtccacgaccgcgtgggttcttagtcaagcagtgcctatctaccctcacaccgcagcctcacaagcagccatggccggcaaggaggttatccgtgcggcccagatgtttacaaagacgggcgaggccagcaaggtcagcgtggtgaaggagattgttattggcacggtcctgggcactgcgctgggcatgtggtggcagacgtggcattggtcagagaacaagaagtgggaagatcattacaaggcgcttgcggcccagaagtgagggacttgttggctgctggttagagcgcctgtctctgcaaggtctgcttacggtggaacggcatggaatgttcacggtcaccttgggagtctgggccacaaagacgtggatagaggccgcagctgcagaggggcgccccaaaccccagctagagcgtacata

SEQ ID NO: 3075 - DNA, 407 bp, Chlorella vulgaris
acgcgtcaggcagaggggggcgaggtgccgagtatgagttgggcgcttgcctaatcctcccttttgtgctgcctgaaccctacaaaacactcgcttgcgcttgatgtaacactgcagcaacttgcatgatactgtgatgcttgctcacagactgtaaacagaatgaagcttaccaaatcccctgattttgtgttgtgcttgttgtctttcataggtcgggtggcaatttgcttacgaacgccccctcccttttgcacccaatgcttggcggtcctgtttgttatgattcatgatgactggaagaacttaaaacgcgtccaggccccttttctgccttctgatgtggaaacatgtataagtgcaacatgtgtcagcagcaggtgtcgtgcgaaccagcaaaatcaaaa

SEQ ID NO: 3076 - DNA, 342 bp, Chlorella vulgaris
cacgcgtacgctatggtagaggggttccgcccttgttgacagcgtggcaagtggtcgttggaagctagcatgcgctacatggggaaacaacaccatggtccgggcagtgcttgcactgctgtagttgtctgggctggcaacttgaaacgcttgctgaactctgggcttccacaggtgtggtcagctcgaatggctacttctcttgtttacccgattttggacgaacaggaagaagtcagtgcctggcttgacttactggccttgcaaactgtgaagcaagggatgaataaaacaaaaaagcacagaaaacaccaagcagaaaagcccattatccggactgaa

SEQ ID NO: 3077 - DNA, 431 bp, Chlorella vulgaris
acgcgtcagggattaaaatcggggctgcagtctgatcagtatggactccactctaaccatgcaggtggacgagttgttcctcctggtggtcaggcatgtgcctcagcttctcctagtggcgctggtggccttcatcctcacgctgtttgccaaggacatattgaacggtctgaagcggccattcctcaaccctgaccagtggcagcccctgccgctggttgacaagaaggtgcttacccacaacacccgccgcttccgctttgcgctgcctcactccgaccagaagctggggctgcctattgggcagcacgtgtcgctcaaggtgccggacggcaccggagcggaggtgttgaggtcctacaccccgtcctcagacattgaccagcggggatatgtggattttgtgatcaagatttatccccaaggccaga

SEQ ID NO: 3078 - DNA, 151 bp, Chlorella vulgaris
aaaggttccaaccttactaaagcgtccatgaaatttcattcaccttcaatcgtttcacaacgtccaattcgggaaccctcttttgacaccttctttactggaaaagccgtagattccctatcttaatctcctttaataacatccacgtttc

SEQ ID NO: 3079 - DNA, 384 bp, Chlorella vulgaris
tttttgctctggcatgcttactggggatgctgacatgtatcctcccattgcgactatgcatgtcagtaaacacttgccagttggtatgccatggtgacagtcaagcgtccaacatgagatggctgccaggcacccctacgtccccttaggcatatgccagtcgttacagtagaaggcttggcaacacaagtggctccttttccatccgttcaaaagtcagatgctcggcccgcgacttcccagtcaccaaagcgagttggctcgggtcccttgggacctccaatctcccctgtctcactcttacggtcctcaggctcctcctcaactacagctgctggctccccctccacagcctggccggctgcaactttgacagctcttgac

SEQ ID NO: 3080 - DNA, 470 bp, Chlorella vulgaris
ttcccgggtggccccacgcgtccgaccacgcgtccgcccacgcgtccgcctatccgaggcttcctcgaagacagaagacatcaacatgtctgacggaggggacagcccgaaggccgccgaggcccccgccgccgccgcggctcccgcccccggcgagcccatggacatcaacaccgccatccagctggtgctcaagaaggcgctggctcacgacggcctcgcacgcggcctgcacgaggcctgcagggccattgagcgcggccaggcgcagctgtgcatcctcgccgacgactgcaaccagcccgactacaagaagctgattgaggccctgtgcgccgagcagagcgtcaacctcattgccgtgcccgaccccaagaccctgggccagtgggcaggcctgtgcaagattgacagcgagggcgaggcgcgcaaggtggtcggctgctcgtgcgccgtggtcaccgactacg

SEQ ID NO: 3081 - DNA, 359 bp, Chlorella vulgaris
attcccgggtcaacccacgcgtccgaccacgcgtccgtgctgtgtgtgttcctattgcccttccgacgtagtgggcccgcgccgcaaccgtaagtttggcatgtcattgacatgcggtactccatgcaactctgttcgtatctttacagcgtttcattgaagacgaggctgactgctccgttgaagaagaagacgacgaggagcgccggtaactgttcaagccttcctcttgccctaccgcgccgtgctgtgttgctattataactctggccatgactcctgttgcgtccgtatggttttgcagcggtgctcggtttgggatgacgcgctggaggactggttgacagatggggatgggg

SEQ ID NO: 3082 - DNA, 425 bp, Chlorella vulgaris
ttcccggtccaacccacgcgtccagctgactgcgggtgatggctacgaaccccatgcaaaaccatatgaaacacatgcggaatagcgctacgctggaggctaggcttgctgtgccccactgtatcgacaagtagctcacctccctgtatgtttagtcgcctgtactgacgtctcggagcttgcattatcttgatcttacagtttttagtttggcccataaaagcatttctgactgctggtcaaagtatgagcctggcactcgccactttttgaatgttggcagcgtgttcgttctttttgtgtttcatgccttgcaatgtgatgtggcagctgttataaacaggatttggtgggtttcagtgcagcgccaggttgctggtatgcttgagagtagcgtgcctgtgtaaattgcttccagcccaagc

SEQ ID NO: 3083 - DNA, 463 bp, Chlorella vulgaris
  unsure (1)..(463): unsure at all n locations
attcccgggtcaacccacgcgtccatctgaggaaggcagtgcatctgctgaggaccgaaacggacaaccatgcagattttctgcaaaacagacaggactcatgtccttgagcttagctccgaggccactgtggccgatgtcaaggctgccatcgaggccagccagggcatcccctgcgatgcgcagcgtgtgatgttctctggtcgccagctggaggaggaggcctccctggccgcctgcggcgtgtctgacgacagccagctgtacatcctgatgcgcctgctgggtggtgccaagaagcgcaagaagaagacctacaccaagcccaagaaacaaaagcacaagcacaagaagatcaagctcagggtgctcaagttctacaaagtanacgacagcggcaaggtgcagcgcctgcgcaaggtttgccccagtgcggccccggcatcttcatggccacgcactt

SEQ ID NO: 3084 - DNA, 257 bp, Chlorella vulgaris
cccacgcgtcaggcggcagccaaggggcggagaggtggcacaagctgctggtgcaagcagtgcgggaagagacagaggctgcaacaaggcagacgactgtgcttcagcaggttttctcttgactgttgcccctgtcacgtgcgctttgcaaggtctggtgccttacaggaaaccagctcgctttttggacgacctccttcatgcactctccccttaaactgtcgggaccagttttgatgaggaagtagcagtgaccc

SEQ ID NO: 3085 - DNA, 444 bp, Chlorella vulgaris
  unsure (1)..(444): unsure at all n locations
attcncggcacgacccacgcgtacgcggacgcgtaagcggacgcgtgggttgatatcgtccactccagggttaccctgaaagcttacaaaggcancaagtcgtcaacatggtctggataatcgcttccatgattcctggctttggtcttaccgtgggcatcctcagtttcttcactgggcttgtctatccaactttcgagtctttccgcgctatcgagtcctccagcaccggcgatgacacacagtggctgacgtattgggttgtcgcctgcacactccaagttgtggagaagcttgcgtggccggttctgatgtgggttcccttttacagcctgtcaaggctggctctcctgccgtggctggtccatgctgcaccaagggttgcccatacctgtatgaggagtggatccggccgctgcggctggccacgccgaccccctcaag

SEQ ID NO: 3086 - DNA, 336 bp, Chlorella vulgaris
cacgcgtaagcaaaatggcgagcaaggtgtccggcgaggtgctgcctgagggtatcgctggggtgctggagggctccaagtccaaggcccgcaagttcacggagaccgtggagctccagattggcctgaagaattatgacccccagaaggacaagcgtttcagcggctctgtgaagctgccttactgcccccgtccccacctgaaggtgtgcgtgctgggtgaccacaagcactgcgaggaggcccagaacgcgggcattgacgcgatgagcgtggatgacctcaagaagctgaaccagaacaataagctggtcaagaaactggccaagcagtatg

SEQ ID NO: 3087 - DNA, 340 bp, Chlorella vulgaris
taccggtcaggaattcccggcaaacccacgcgtcagcccctgtaggctacagtttgagggagcatcaccatgccggcgggacagggctacagggcccgcacgaggtatatgttccaacgccccttccggggcaagggatacattcctctctccacttacctgaccaactacaacgtcggcgagtatgtggacgtcaaggttaacggcgcagtgcacaagggcatgccccacaactactaccatggcaagactggccgcgtgtggaacgtgaccaagcgggcacttggcgttgagatcagcaagaaggtgaacgggcggatcatcaacaagcgcatccacg

SEQ ID NO: 3088 - DNA, 392 bp, Chlorella vulgaris
attcccgggtcaacccacgcgtccgaacgttactgcctcctgcacaccaactaaacttgaaggctgtcggtctgataagcaccatgcaggctgtcgctgctcccacaaggcccgcggctttcaccgccgccaggaagccctctgcccgcccggcgactcgccttcacgcgctgaaggcagtagcccagcagcagcctgagagcgaggcacagtggaggctgcagcgccgctcacttgccagcctgctagctgctgcaccggcgctgctgcctgccagccgcgcgcttgccctactgcctgatgatgaccaataagagctaattgagaagggcaaaggccgtccccagggtccggttccaaccgaaccccaaaaccaaccggcctaacaacct

SEQ ID NO: 3089 - DNA, 445 bp, Chlorella vulgaris
aattcccggttcaacccacgcgtccacccacgcgtccgcccacgcgtccggctcaaagctaagggaatagacaccatcgcctgcatctctgttaacgacgcctttgtcatggacgcctggggcaagtctgtgggtgccgatggcaaggtgctgatgctggcggatggtagcgcgcttttcaccaaggcgattgatgcggagctggacttgacagacaaggggctgggggtgcggtcgcggcggtacgcaatgctggtggatgatggcgtggtcaaggctctgaacatggaggagggcggcgctttcacagtcagcagcgcagaggacatcttgtccgggctctaaacaggtggcaaggatgcggttttgtggaggcgggatgcaatccatcattggttgcttgccttagtacctctgcccaggtggtgggcaactccctggtggc

SEQ ID NO: 3090 - DNA, 432 bp, Chlorella vulgaris
aattcccgggtcaacccacgcgtccaggcggcggaaagcaccaagatggcgaaggacaagtctcgctccgccgaggtggtgacccgcgagtataccattaacctgcacaagaggctgcatggcataaccttcaagaagagggctcctaaggccatcaaggagattaagaagtttgcccagcaacaaatgaagaccagcgacgtgcgcgtggacgtcaagctgaacaaggccgtgtggagccagggcatcaagaacgtgcccaaccgcctgcgcattgtgatccagcgcaagcgcaacgaggacgacgacgagaaggaggagatgttctccctggtcaccctggccgaggaccagagcagcaagggcaagggcgtggtggtcctggaggcataaacacacacacgcgcctcgcggggggagctgccgcagcag

SEQ ID NO: 3091 - DNA, 391 bp, Chlorella vulgaris
aattcccggcacgacccacgcgtacgcccacgcgtccgcttgtctgtgggttcgtgtggcagctcgactgcaccatggcgacccccatctccaagaagaggaagttcgtgcaagacggcgtgttttacgctgagctcaacgagctgctcaccagggagctggcaaccgatggttactctggtgtggaggtccgtgtgacacccatgcgcacggaaatcagcatccgtgccacccgcacacagaacgtgctgggggtcaagggacgccgcatccgcgagctgaccagcgtggtgcagaagcgcttcgagttccctgagggctcagtggagctgtatgctgagaaggtggccaaccgcggccgcggtggcgtgcgccaggcagagtccctgcg

SEQ ID NO: 3092 - DNA, 255 bp, Chlorella vulgaris
caggtaccggctaggaattcccggcacgacccacgcgtacggcgccaagcgcgccgcagaggaggcagcagcagccaaggacgccgcataagcggggggcggcggtggcatttggagcacccgtggaacccgcagtgctggctagggaagggctgcgctcgggatatagatgatcaggtgacatgttcatgcacacggtcaaaggggcgagcggcaaagcggaaggggtcggcggctcgagaggatccaagctta

SEQ ID NO: 3093 - DNA, 329 bp, Chlorella vulgaris
gaattcccggctcgacccacgcgtacgcccacgcgtccgcggacgcgtgggttctgaacaggcagtgccctatgcagggcgggggagaaaatggcgcagctctccggccagcttggcgtacatgcggttttggaagctggaagttgggcagaggaaacacagctactgtgccaggggtgcacggtgatccgtgcagtattggttttgtccaaggccgcacgaagtagccagaataatgggcagtagacagccagcgtggagcaggcggcgtgcgtgctgtgcgtgctgcatagcaatggctgttgactgttggacgtaacactggcgta

SEQ ID NO: 3094 - DNA, 405 bp, Chlorella vulgaris
aattcccggcacgacccacgcgtacgagcgattcgaactaacgcctatccgaggcttcctcgaagacagaagacatcaacatgtctgacggaggggacagcccgaaggccgccgaggcccccgccgccgccgcggctcccgcccccggcgagcccatggacatcgacaccgccatccacctggtgctcaagaaggcgctggctcacgacggcctcgcacgcggcctgcacgaggcctgcagggccattgagcgcggccaggcgcagctgtgcatcctcgccgacgactgcaaccagcccgactacaagaagctgattgaggccctgtgcgccgagcagagcgtcaacctcattgccgtgcccgaccccaagaccctgggccagtgggcaggcctgtgcaagattg

SEQ ID NO: 3095 - DNA, 448 bp, Chlorella vulgaris
gccaacccacgcgtccacccacgcgtccgcccaaagaaacatctgaagagattgaatgccccgaagcactggatgctcgacaagcttgggggcatctttgcccccaagccgagcgcgggcccccacaagacccgggagtgcttgccgctcatcctgctgctgaggaacaggctcaagtacgctctgacgggcaaggaggtgacgagcatcctcatgcagcgcctggtagaggttgaccgcaaggtgcgcactgacaagacctaccccgtgggcttcatggacgtggtcaccatccccaagaccgacgagcacttccgcctggtctacgactgcaagggccgctttgtggtgcaccgcatcagcaaggaagaggcggcttacaagctgtgcaaggtccgccgcgtgcagtttggcaagggccggcgtgccctaaattgccacccacgaa

SEQ ID NO: 3096 - DNA, 468 bp, Chlorella vulgaris
cgggccagaattcccgggccaacccacgcgtccgcgtggaatcccccgtcgacaacaggtccaaggttcacaagatgcagaccctctctgcccgtttcggcgtccgcgcccctgtctcccggggcacccgccaggtgacccgcgcctccgtggagtggtacggccccgaccgcgccaagttcctgggccccttcaccaaccccccttcctacctgaagggtgagttcgctggcgactacggctgggacacctctggcctgtccgccgatcccgagaccttctcccgctacagggaggttgaggtgatccatgcccggtgggccatgcttggcgcccttggctgcgtcgtgcccgagctgctggaccgcaacggcaccgtcaactttggcgagaacgccgtgtggttcaaggccggtgccgccatcttcggcgatgacgggctgaactacctgggcaaccctccctcat

SEQ ID NO: 3097 - DNA, 470 bp, Chlorella vulgaris
  unsure (1)..(470): unsure at all n locations
attcccggggccaacccacgcgctccacccacngcgtccgcccacgcgttccgcgttgtgcgggtctgtaaaggcgcattgccnagaagccagtcgtccgccggggcaaaacaagccaccnatgaggaacgacgctggcgagattgtggatctgtacatcccacgcaagtgctcgtggaccaacaagctcatcacggccaaggaccacgccagcgtgcaggtcaatattggccacctggatgagaatggcgtgtacactggcagcttcagcacctttgccctgtgcggccaggtccgctccaagggtgaggctgatgccgctatggacctgctctggcagaagaagaaggctgagattggccagcagtgattggagcttgagcgcgggcagcacgctgctgtgcacgctgtgatgccctcggagcaaagcgggcagtgcacggtcatggcagttaccatttggcagcggc

SEQ ID NO: 3098 - DNA, 435 bp, Chlorella vulgaris
attcccggttcaacccacgcgtccgctctgacatcactcagcaatccggtacaagcgcggcagtcacaatggcgaggaccgagcagacttttgtgatgctgaagcccgatgcggtgcagaggaacatcatcggcgtggtcattgatcgcttcctgagcaagggctacatcctacgcggccttaagttcatgaacgtgactaaggatcatgctgagcgccactatgctgacctggcctccaagcccttcttcccaggcctgatcgagtacattaccagcggccctgtggtggccatcgtgcttgagggcaaggacgtggttgtccaggcccgcaagatcatcggtgccaccaacccgctggcctccgacccctccaccattcgcggccagtatgccatcgacgtgggccgcaacatcatccacgggtccgactctg

SEQ ID NO: 3099 - DNA, 98 bp, Chlorella vulgaris
  unsure (1)..(98): unsure at all n locations
ttcccgggctagacccacgcgtcacgcccacgncntccaggcggccacgtgtcgcatggtggtgtggcgagcggggtcgccgggccgcaacgctggcc

SEQ ID NO: 3100 - DNA, 412 bp, Chlorella vulgaris
gaattcccggcacgacccacgcgtacgcccacgcgtccgcagcaccttacctccggttgaccgcagacatgacgctgaccgccttcgcttgcttcagctccagcttggccggcaaggctgcccaagcctgcaagcggcagcagacagcccggcgtgctgtgcgctgcaacgctcaggatgaacagaagtccttctttgagagcaatcgccgcgcggctgtgggctacacagacgaggatagtgcagggcagagtaacatctttgcagtagagcccaaggtttatgtgtcaggctcatctgcggataactccaaggctggcccccagactgtaaccgtggcggctgcgggcttcgtgggtgctatggcggctattggtgctgggcttatcgtgatgaatcaaccacagggttg

SEQ ID NO: 3101 - DNA, 456 bp, Chlorella vulgaris
attcccggttcaacccacgcgtccgcccacgcgtccgaaaactcgttttcctggtgtcttgcgccgggtcgctggccatggcatctctgctcaagcagtcgcctctccagaggctggccaagatggtggtgacaccaatgaacgtgtcggctgcggcaacttggggcggcgcagcggctctcactgctctgtggctggttcagccttttgactggttgaagcagcagctgggcctggagaagcccgaggaatgatatattgcagctggtgatggaacttctgtcactgggacaacagctgctcctgtacctggcgctgcggctcggcccttgcttgtgctcccatttccctcgcagtatgaactgatcagtgtcacacaaagacgcgctccttggcggtacttgattgccaaatggttagtgagcctgtcgcgattgggccagtgtgcatgcaatg

SEQ ID NO: 3102 - DNA, 458 bp, Chlorella vulgaris
  unsure (1)..(458): unsure at all n locations
attcccgngtcggcccacgcgtccacggacgcgtgggcgcgcgggccgcggcttcacgctggaggagctcaaggaggctggcattccctccaagcttgcccccaccattggcattgcagtggaccaccgccgcaagaacaggtcccttgaggggcttcaggagaatgtgaaccgcctgaaggcctacaaggccaacctggtggtgttcccgcgccgcgccggcaagcccaaggccggcgatgccagcgcggaggagctcaaggcggtcgcgcagctcagcggcccggtgctgcccgtcacacgcgctgcgcccgctctggagaaggttgccatcaccgccgagatgaaggccgagaaggcataccacaccctgcgcacggagcgcatgaatgcccgcctggttggcgtgcgcgccaagcgcgccgcagaggaggcagcagcagccaaggacgccgcat

SEQ ID NO: 3103 - DNA, 390 bp, Chlorella vulgaris
  unsure (1)..(390): unsure at all n locations
attcccgggtcaacccacgcgtccgtagctccgcaactgagcaccagcgccccgacaagcgctccgtctgagctagggcggnattccntcnaagcttgcccccaccattgacattgcagtggatgggcgccacaggagcaggtctcttgacgggcttcaggagaatgtgagccgcctgaacgcctacatcgctagcctgatggtgttcctgcgccgctccggcatgcccagggccggcaatgccactacggatgagctcatggtggtcgctcagctcatccgcctggtgctacccgtcacactcgctgcactcgctctggacaatgttgccatcattgcggagatgatcgcccagaaggcataccacatcctgctcacggagcgcatcac

SEQ ID NO: 3104 - DNA, 419 bp, Chlorella vulgaris
aattccggctagacccacgcgtccgagcaacgatggcctccaccatgacctgcaccgccctgcgcgcctcggttgccaggagggctgccccggcccgccgcggtgccgtgaaggtccaggccgcggccaagcagatcccccactggctgcccggcaccccccgcaaggactagctggatgccgctgacctgccaggcaacttctcctttgaccccctcaacctgcgcgacaaccccactgcgctcacctggttccaacaggcggagctgcagaacgcgcgctgggccatgctgggtgttgccgggatgctgaccccggagctgggtgccaagctgcgcggcttcaccggcccgccggcagggtgccatggtatgatgtgtccaactacgacgtctgggcccccgccccacactgggagg

SEQ ID NO: 3105 - DNA, 250 bp, Chlorella vulgaris
aattcccggcacgacccacgcgtcagcggacgcgtgggcggacgcgtgggctggtgttgggctacagggagcataacatactggggattgacctcaaggccggcggccgcaacaagcgggtccacaggaccacccccaacatcgacaagccctagcgcgaacggctcgtgcgagctgtaccggttcctggtgcggcggaccgactctcagttcgagcgggtccgcctcaggcgcctcttcatgtccagga

SEQ ID NO: 3106 - DNA, 327 bp, Chlorella vulgaris
aattcccggcacgacccacgcgtaaggcgggccgcagctaccacaagtacctcgtcaagcgcaacagctggcccaaggtgcgtggtgtggctatgaaccccgtggagcatccccacggtggtggtaaccaccagcacattggccacccctccaccgtgcggagggacgcgccgcccggccagaaggtcggcctcatcgccgcccgcatgacaggtcgtatccgcggtaccgccattgtcaagcccgacaaggactaagcgttgcgaaatgaggcggccgcagcattgcagccgtatagggctggcgggaatgggcagcggtggctct

SEQ ID NO: 3107 - DNA, 326 bp, Chlorella vulgaris
gaattcccggctacgacccacgcgtacgggccgtgcagctgctggaggccgggctcaaggttcgggagtacgagctgcttcgtcgcaacttctctgacagcggcaactttggctttggcatcaatgagcacattgacctgggcatcaactacgacccctccaccggcatctacggcatggacttctacgtggtgctggagcgccccgggtaccgcgttgccaagcgccgtgccaagctctccaaggtgggcgtgcagcaccgcgtgactaaggatgatgccatgaattggttcgagacccgctgtgagggcatcgtgctcaacaag

SEQ ID NO: 3108 - DNA, 328 bp, Chlorella vulgaris
cccacgcgtcaggcgagagtgaaagcgagtcatcctccggcgagggtgactcgtcctccagcgagggtgagtcaccttccagcgaggctgaggcaccttcaagcggcgagggtgaggcatcttccagcagcgagggtgagtcgtctccgagcagcgaggctgatgcaccttccagcgagggcgaggctgaggcacctgccagcagtgagagtgagtcatctccaagcgagtccagtgcggacaaggaggaggaggaggagcatgaggccgccggcgagggcgaggcgcacagctcccccagccccagctagggcgaggcgcacagccc

SEQ ID NO: 3109 - DNA, 346 bp, Chlorella vulgaris
attcccggttcaacccacgcgtccaaagagggcctgcgagcgctgtggactggcctgggacccaatgttgccaggaacagcattgtaaatgcggcagagctggcctcgtatgacgaaatcaagcatgagctgctgcgggcaggcgcggacattggggcctctgagagcggcgcaggggactaatgatgcggctgctcacagcatgctgtgcctgcattgccgtattcctgtgtacgctgccattgtagggcccgggagcaaaccaacccagtcacctcgttagtgcgccaaagcagttggtgtgcatcttgcgaaaaaaacgcctgacaagtaacttatagcatac

SEQ ID NO: 3110 - DNA, 450 bp, Chlorella vulgaris
cggtccagaattcccgggccaacccacgcgtccggcacagcgtagcttgctgctgctcttctgtcttgcactttcccacccaagttacttcccttctgccctcatagtgactctgtccatgactgttgggttcagttactgtagaacttgggcgaaagggccgcagtgatgtgcctatattgctcactcaattgacaagggttgctggctggtgtcttctttgtgaatggcttgcaaggctgggcagaagctgtaaactaggctagactggtgtcctcatgtcttttgttctttttgatcagggtggacatgaagaaggcagccttgccctgctcatgagttttggcggagttcatgttgggaagccttcttgtcttgagccaaacctgtgcagcgcacaagtgctgtaacctgtgctagtgcttgtgctgggatggactgccatatagc

SEQ ID NO: 3111 - DNA, 85 bp, Chlorella vulgaris
cccacgcgtcacgcccacgcgtcagcccacgcgtccgaaaaaaaaaaatgtgcgacaaaccaacaaagaaaagaaagacatggag

SEQ ID NO: 3112 - DNA, 332 bp, Chlorella vulgaris
aattccgggcatcgacccacgcgtacggtctggcttccttttcagtagtgcatctgagtgtgactggccagcaggagcgtacgtgttgtgcttgtgtctgactccgacagccacacccatcaggcagcacagcatccccagtgaaccttggtgctgggggcttccctgcactctgtgacgtcttcgtttgaaaagctatgtatctccatactatgtctgcgagatggtgtgagtgttctgccctgtattctgtgcgcgagaggtgtgtcggggctgtgctgcggacaagtgtggcccccagggggcactggcgcgtcctgtcagcccaggaa

SEQ ID NO: 3113 - DNA, 252 bp, Chlorella vulgaris
aattcccgactcgacccacgcgtacgcccacgcgtccgcggacgcgtgggtcctagaccacctagaaacagtagcaccatccagacccagagcttcgccaggggcaccgccctccgcaccgcccgtgcaggccaaggtggcccggccacagcggaggagcgtcgtggtgcgggccgacggcttcagcggcagctgcacgaaccagatcagggtccggaggcggatgctgcccatcatcgccggccgctttgg

SEQ ID NO: 3114 - DNA, 332 bp, Chlorella vulgaris
aattccgggctcgacccacgcgtacgcggacgcgtgggggaaggcagtgcatctgctgaggaccgaaacggacaaccatgcagattttctgcaaaacagacaggagtcatgtccttgagcttagctccgaggccactgtggccgatgtcaaggctgccatcgatgccagccagggcatcccctgcgatgcgcagcgtgtgatgttctctggtcgcaagctggaggaggaggcctccctggccgcctgcggcgtgtctgacgagagccagctgtacatcctgagtcgcctgctgggtgggtccaagaagcgcaggaagaagacctacaccaag

SEQ ID NO: 3115 - DNA, 451 bp, Chlorella vulgaris
aattcccggttcaacccacgcgtccacccacgcgtccgcccacgcgtccgcgacgtcgagatggtgtcctgcactgcccaggctgcgctgcagagcactgctttcgcggctaagacccgcgtcagcagggtcacccgcagggccgtcgtggtccgggccgagaaggagaacacccagatcgaaaaggcggaccgcgttgccaagagcggcggccccatctatgtgaacgccactgatggctctgctctgtcgtaccttgacggcagccgccctggcgacttcggtttcgaccccttgggcctcctggaccccgccaccggctctggcggcttcatctcgcccgagtggctgacttactccgaggtcatccactgccgctacgccatgctgggtgcggcgggctgcatcgcccccgagatccttgccgccgccggcgtgatccccatgagcc

SEQ ID NO: 3116 - DNA, 330 bp, Chlorella vulgaris
ttcccggctagacccacgcgtcagcccacgcgtcaacccacgcgtccgtgcagccccgatggccacgaagcaactctttaggcgacccctgatggggtcctcgcatgccgtgttgcccacatctcacaagctgttgacaaactgcgcagcaaaaagcgatcgtgccagttgcgcgtgcacttgcgcagctagcaggcggcaggctttgctggccatagttgcaagtgccgtcgcgctgcttgagaaggcgagctgggcccaaggggccgcaggcgaccctgctgcagccccagttcgaccaccagcgaacagtgctggaaaggactctgc

SEQ ID NO: 3117 - DNA, 455 bp, Chlorella vulgaris
attccgggtcaacccacgcgtccagctgaacacaccctccttgccctcccagcccagctaggaacctctcacgatggcggcccaagccttcgcttccaccttcaccggcgcctccctgcgcccatctgtacaggcccgccggtcagcccgcaaggccgtcgccaaggtggcagtgccccgagcggcccttgaggaccagcgctgtgccacgccctttgatggcttcaaattttctcccatcaaggagtccgcgatcagccgctccatgaccacacgctactttgctgacctgtacaagaatgccgaggtggatgtggttatcgtgggcgctggctccgcgggcctctcgtgcgcatatgagctgaccaagtaccctgacgtcaaggtggccatcattgagcagggcgtggcgcctggtggcggcgcctggctgggccgccagctcttctccgcca

SEQ ID NO: 3118 - DNA, 477 bp, Chlorella vulgaris
cgtaccggtctacaattcccgggccaacccacgcgtccaagcacatctcgccctacaagcaaacccttaactcctaggtgcagcgccgacactaccgtactcccatgtccggcaggcccgaccccatcaccaaggctgcaaacgccgctagccctggagttccaaggagcataagagcaaggaccgggcagaccacagatccggtacctgagggtttccaggagtcctcgtcaccaacgcaccacctgccagtggagcctgctgagcacgatgtggaccgcaccaagttgaaggcggcggaggagatgggggtgagcgaccagcagctggcttccttcaagggcaattctgacatggagacggaggagaaggccaaggagctggtgcaccgtaacatgactgaggagattaggcaccgcgccaacaaggctgagcagcagccacagaaagaggttcgccaggcgcagggcccgcccc

SEQ ID NO: 3119 - DNA, 458 bp, Chlorella vulgaris
cggtcaagaattcccgggtcaacccacgcgtccaagcccgcagcagcacctaacacacgcaccaggcaccatgctcatctccaagaagaacatgcgtgaggtgtacaagttcctcttcaaggagggtgtgctgtacgcggagaaggacttcaacctgccggagcaccccgagattgagggggtgtccaacctggaggtcatcaagctgatgcagtccatgaagagcaaggacttggtcagcgagcgctatgcctggcgccactactactggttcctgacggacgcgggcatcgagcacctgcgtgagtacctgaacttgcccagcgagattgtgcccgccacactgaagaaatcgaccaggcctctggagcgggagggcgcacgcccgccgcgcggcgacaggccgccccgccgcttcgacggctagggccgcggcggctaccgctctgccgagggca

SEQ ID NO: 3120 - DNA, 239 bp, Chlorella vulgaris
aattcccggcacgacccacgcgtacggttaccatgtgatgtacagtatgtgaagttttactgtgcactttaccacggctgtgcccagcatttgtacctgcctgattttggagatgctcctgtgtggctgccagaccctgccctacttctttgccactgcctgtgcttgttgtgggagtgggccttcttccaggtgacatgagatgcgaagcctgcgtgtgtaaccccttcgatcgaaaa

SEQ ID NO: 3121 - DNA, 334 bp, Chlorella vulgaris
aattcccggctcgacccacgcgtacggcggcggaaagcaccaagatggcgaaggacaagtctcgctccgccgaggtggtgacccgcgagtataccattaacctgcacaagacgctgcatggcataaccttcaagaagagggctcctaaggccatcaaggagattaggaagtttgcccagcaccaaatgaagaccagcgacgtgcgcgtggacgtcaagctgaacaaggccgtgtggagccagggcatcaagaacgtgcccaaccgcctgcgcattgtgatccagcgcaagcgcaacgaggacgacgacgataaggaggagatgttctccctggt

SEQ ID NO: 3122 - DNA, 250 bp, Chlorella vulgaris
aattcccgacacgacccacgcgtacgcccacgcgtccgccgcagcgggtatgagatccgccgcaagaattttgcattatcagctaccaataatggacaagtgtgctactgaggtgccagcgcacgaagcgaccaatttaggccatagaaggagaccctgttagggcatagattggacaccatccggttacgaggaccatcgttctgaacgccagcagctgtctcgggggttctcatgatagtggcggatc

SEQ ID NO: 3123 - DNA, 327 bp, Chlorella vulgaris
aattccgggctcgacccacgcgtacgctgcagcagcagttggagaagcagaagcagttccacgctgccaacctggagagctaccgcgccgccagggagcagtacctgaaaaaggtggaggacagcgtggatttcctgaagcagcatgggctgaccggcgccgcgaaggctgccgccgacgaggtgggcgccaagctggccgatgcccagaagctgcgaggcgacctcatccaccaggtgcaggaggccgtggaccgcgtgctagccgtcgcccccgtcagtaagctgctgcaggctgctcgcgcgcaactggatgccgcctacgcca

SEQ ID NO: 3124 - DNA, 458 bp, Chlorella vulgaris
attcccggttcaacccacgcgtccggaagccgccagaatgcagaccaccttcgtgggcaccacccaggcgctgcgcgccaaggtctccacccaggccactcgtggctccaaggtagcaacctccatgcgccgcaccgtcaagtccaagaacgtgaagaccaccgacaccagccagtggtacggtcccgaccgccccaagttcctgggccccttctccgagggtgctgtgccttcctacctgaacggcgagttcgctggtgactacggctgggacaccgccggcctgtccgccgaccccgagaccttcaagcgctaccgccagattgaggtcatccatgcccgctgggccatgcttggcgccctgggctgcatcttgcccgaggtcctgcagaggtacagcggcatcgagttcggcgaggctgtgtggttcaaggctggcgctcagatcttctctgacg

SEQ ID NO: 3125 - DNA, 392 bp, Chlorella vulgaris
attcccggtctagacccacgcgtcagcccacgcgtccacccacgcgtccgcccacgcgtccggtgggcaccccgggtgggggccaggcagctgggcatgaacctgagagctgccgcgatgccaaagcgcgcgtccacggccttttgccccttcaagctggcacacacagccaggctgtctgagctggcccgggctcgccccacggggaacaggagggtcatccatgccagaggcagcctggggtcagaaaggaaacacccctccagccttcgcttcgaccacctttttacacgtggagcaccagcatgtaaatactgtgggcagcagggtgttactcagaatgtcgtgtgcaacagcaatcagacacctgcagggctgggcactgcccatgg

SEQ ID NO: 3126 - DNA, 461 bp, Chlorella vulgaris
attccgggtcaacccacgcgtccagctcagcactgcaatgacactacgtggaggcattgccttgctgagcgtcctgcttctggtagtgatcacccgcgcagacgagctagatgccacagggactgtcctggtaacgtgcagcagcgtcgtgaagctccaacacgaccgactgaagaacgtgttgcacagccacgaggtggcctatggctacggccggggcagcgggcaacagtcagtgacgggcttccctgggaaggacagcgcagagagcttctgggtggtgaagacagaggagggcgttccgtgcctccaaggcacccccatcaagtccggcacgcgtgtgcggctgcagcaccaatccacccgcaagtggctacacagccaccagtacagctcgccgctgtctggcagccaggagatcagctgctttgggtcggaccacgagtctgacacgggggatg

SEQ ID NO: 3127 - DNA, 413 bp, Chlorella vulgaris
  unsure (1)..(413): unsure at all n locations
ttcccgggtcaanncacgcgtccaaggacaggctgatcgagggcagggatgagcgccttgcttgggagtatcacacagctcagcagtactagagcgcccagtaaactggggccggccttggtgtggaacctgtgcgtggtgacacttttcgagctgctgtttgttgtgtgatgtgttgttcagtgttctccgttaggaggtgcctgccgttgttgtgctgcattagctatgccagctttgattttatatgaagtgggcttctctctactggcaaaggttacgtagccgtgtatttttttatttacgaagggtggtactgtttgggagcttgccataaggtttgcccaagaatagttttgtcggtgtcgtctaccatcgccgacgctcagtttgctcctgttaactcctacatt

SEQ ID NO: 3128 - DNA, 409 bp, Chlorella vulgaris
ttcccggcctagacccacgcgtcaggtggatgaccacaagaagctgaacaagaacaagaagctggtcaagaagctggccaagcagtatgccgccttcctgtcctctgacagcgtgatcaagcagatcccgcgtctgctgggccccggcctgaacaaggcgggcaagttccccaccctcatcacccaccaggactctgtggagaacaaggccaccgagatccgcagcagcgtgaagtaccagctgaagaaggtgctgtgcctgggcgtggccgtcggcaacgtcagcatggctgagcgcgagctctacatcaacatccagatgagcatcaatttcctggtgtccctgctgaagaagacctggcacaacgttaagtccctcgacatcaagtccaccatgggcaagccgtac

SEQ ID NO: 3129 - DNA, 417 bp, Chlorella vulgaris
ggtaccggctaggaattcccggcacgacccacgcgtacgcccacgcgtccgcttgaaagtgcatctctcacgcttcaaccctcaaaacgaactgctcgaccatgtcgcagagcaactaaggcttggaagctctgcttgacgaggcccttgacgagttcgacaccaccaccccagctattaagcagagcacagcccgtacagaaaccgcagcaagtgatttgccagtgccaagagaaggcagccatacagacctctcagctgtgggagggcccgacaccagtggtgaggcggcagcaccgggtccgtccctcgcttcgcagcctgagacctttgcggctgccagtgcacgccaactgccagcggcagcagatgcatcaactcttgctggcccatctcggcaaccacgtgccccagtac

SEQ ID NO: 3130 - DNA, 356 bp, Chlorella vulgaris
gaattccgggctcgacccacgcgtacgcccacgcgtccgggcagcagcagtggtggcagcagggggggggacactggcagcccaggcaacacagtgtggctaccccgcagcagccagagctttgagggcatgtgtgtcgaggtgcagcaggtggaaacagcaccaccggtcccagctacgttggcaacacaggtgcagcagcaggagcagctgcaaagccggtcagatctggtgcaggagcagacgacaacagcacccatgctgtactgcggtgcacagctgctgaggcttccgccggagcagcggcttgcggcagctgcattgacacggggcccgctcctgcgaccagctcaagt

SEQ ID NO: 3131 - DNA, 392 bp, Chlorella vulgaris
  unsure (1)..(392): unsure at all n locations
attcccggtctagacccacgcgtaagcggacgcgtgagacggacgcgtggggcangagtcagggcggagcggttgctgtcttcaagaccgcacacagccaagatgaatgtggaaaagctgcagaagatggccgggagcgtgcggacgggcgggaaggggtctgtgcggaggaagaagaaggcggtgcacaagaccacctccaccgacggacaagcgcctgcagaacacgctcaagcgccttggggtgaacaccatcccgggcattgacgatgtgctgctgctgaacaacgagggcaccgcgctgcagttcaacaaccccaaggtgcaggcgtccatcgcggccaacacctatgttgtctccggccccgcgcagcagaaccgcgcccaggacg

SEQ ID NO: 3132 - DNA, 463 bp, Chlorella vulgaris
attcccggtccaacccacgcgtccacccacgcgtccgcccacgcgtccggtggaatcccccgtcgacaacaggtccaaggttcacaagatgcagaccctctctgcccgtttcggcgtccgcgcccctgtctcccggggcacccgccaggtgacccgcgcctccgtggagtggtacggccccgaccgcgccaagttcctgggccccttcaccaaccccccttcctacctgaagggtgagttcgctggcgactacggctgggacacctctggcctgtccgccgatcccgagaccttctcccgctacagggaggttgaggtgatccatgcccggtgggccatgcttggcgcccttggctgcgtcgtgcccgagctgctggaccgcaacggcaccgtcaactttggcgagaacgccgtgtggttcaaggccggtgccgccatcttcggcgatgacgggctgaactac

SEQ ID NO: 3133 - DNA, 422 bp, Chlorella vulgaris
attcccgggtcaacccacgcgtccgaccacgcgtccggatccccgtctcgcaatagttccagggcaatcactatgcaggcaaccatgatgaagaccttcggcgccagcctgcgcaaggctgtgcccacccagggcaagggcacccgccaggtgacccgcgcctccgtggagtggtacggccctgacagggccaagttcctgggccccttctctgagggctccacccccagctacctgaagggcgagttcgccggcgactacggctgggacactgctggtctgtctgccgatccccaaacctttcgcgcccaaccgccaagttgaggtcatccatgcccgctgggccatgcttggcgccctgggctgcctgacccccgagctgctgcagaacgccggcgtggccagcttcggcgacgctgctg

SEQ ID NO: 3134 - DNA, 460 bp, Chlorella vulgaris
attcccgggccaacccacgcgtccagaggaaggcagtgcatctgctgaggaccgaaacggacaaccatgcagattttctgcaaaacagacaggactcatgtccttgagcttagctccgaggccactgtggccgatgtcaaggctgccatcgaggccagccagggcatcccctgcgatgcgcagcgtgtgatgttctctggtcgccagctggaggaggaggcctccctggccgcctgcggcgtgtctgacgacagccagctgtacatcctgatgcgcctgctgggtggtgccaagaagcgcaagaagaagacctacaccaagcccaagaagcagaagcacaagcacaagaagatcaagctcagggtgctcaagttctacaaggtagacgacagcggcaaggtgcagcgcctgcgcaaggtttgcccccagtgcggccccggcatcttcatggccacgcact

SEQ ID NO: 3135 - DNA, 129 bp, Chlorella vulgaris
attcccggcctagacccacgcgtcagtccacgcttcaaggtatgcttccgcccacacgtccgtccatactgcacggtgtcgtgctttgaccagccgattcttgaggcgctgagcgcgtccaaggcacgc

SEQ ID NO: 3136 - DNA, 396 bp, Chlorella vulgaris
aattcccgacacgacccacgcgtacgatcccccgtcgacaacaggtccaaggttcacaagatgcagaccctctctgcccgtttcggcgtccgcgcccctgtctcccggggcacccgccaggtgacccgcgcctccgtggagtggtacggccccgaccgcgccaagttcctgggccccttcaccaaccccccttcctacctgaagggtgagttcgctggcgactacggctgggacacctctggcctgtccgccgatcccgagaccttcgcccgctacagggaggttgaggtgatccatgcccggtgggccatgcttggcgcccttggctgcgtcgtgcccaagctgctggacggcaagggcaccgtcaactttggcgagaacgccgtgtggttcaag

SEQ ID NO: 3137 - DNA, 377 bp, Chlorella vulgaris
attccgggcatcgacccacgcgtacgcctcgacggcgagctgccaggcgactacggctttgaccccctgcgcctggctgacgaccccgagaaccgcaggtggttggtccactccgagatcttccacggccgcgtggccatgaccggcgttgcgggcatcctgtacacctcgctggccaatgcctccggccaggacatccccgagtggtttgatgccgggaaggtgtacgctgagacccaccccgatgtgccctttggggccctggtgtacaccagcttcctgctgagcggctgggctgaggccaagacgtggcaggactacaagaagcctggcagccaggccgatggctccttctttggcatcagggatgagttcag

SEQ ID NO: 3138 - DNA, 435 bp, Chlorella vulgaris
attcccggttcaacccacgcgtccagacaaagaagaggaggaactcgggtcgcaacaagcacggccgtggccatgtgacccgcgtgcgctgcgaatcctctggcgtgctggtccctaaggacaaggccatcaagcgcttcattgtcaggaacatcgtggatgcctccgccatccgtgatatccaggacgcttgtgctattgatgggtatgcgctgcccaagctgtaccgcaaggtgtattactgcatcagcgcggctatccactccaagattgtgcgcgtgcgcagccgcaagaacaggcgcaacagggagccgcctgcacgccctggtttcgggccccgccgtgagggccagcagggcgggcagcagggccagcaggggggggggcagcagggaggacagcagcagcagaagtgaggaggcagcgcgccgctgt

SEQ ID NO: 3139 - DNA, 347 bp, Chlorella vulgaris
  unsure (1)..(347): unsure at all n locations
gtaccggtccgtaattcacgggtccacccacgcgtccggaaaccccttcgcagcagcaaacaatggcagcagttgaggaggttgagagggttgagcangtggaggacgtcgaggatgacgtcagtgacgatgtcagtgacgacgaggagggagaggaaggcgaggagggcgagcgcaggggcaagcagagccgctctgagaagaagagcaggaaggctgtgcanaagctgggcatgaagcctgtgccaggcgtaatgcgcgtgcagatcaagaagagcaagaacatcctttttgttatcaacaagcctgatgtgtacaagagcccctcttctgacacctacgtcatc

SEQ ID NO: 3140 - DNA, 445 bp, Chlorella vulgaris
attccgggtcgacccacgacgtccacatcaccatgccggcgggacagggctacagggcccgcacgaggtatatgttccaacgccccttccggggcaagggatacattcctctctccacttacctgaccaactacaaggtcggcgagtatgtggacgtcaaggttaacggcgcagtgcacaagggcatgccccacaagtactaccatggcaagactggccgcgtgtggaacgtgaccaagcgggcagttggcgttgagatcagcaagaaggtgaacgggcggatcatcaacaagcgcatccacgtgcgcattgagcacgtgaggcccagccgctgccgcgaggagttcctgcaaaggtgcaaggagaacgatgccaagaagcacgcggccaaggtggcaggcgagccccacctggtgaccaagcgtcaaccaaaggcccccgcaac

SEQ ID NO: 3141 - DNA, 441 bp, Chlorella vulgaris
  unsure (1)..(441): unsure at all n locations
ccgggtcgacccacgacgtccatccaaggcaggagtcagggcggagcggttgctgtcttcaggaccgcacacagccaagatgaatgtggaaaagctgcagaagatggccgggagcgtgcggacgggcgggaaggggtctgtgcggaggaagaagaaggcggtgcacaagaccacctccaccgacgacaagcgcctgcagaacacgctcaagcgccttggggtgaacaccatcccgggcattgaggaggtgctgctgctgaacaacgacggcaccgcgctgcagttcaacaaccccaaggtgcaggcgtccatcgccgccaacacctatgttgtctccggccccgcgcagcagaagcgcgcccaggacgtgatggcgcagatgcttgcgggcatgggcggcatgccgggcatggcgtccatgatggcgcanatgggcgctgg

SEQ ID NO: 3142 - DNA, 421 bp, Chlorella vulgaris
ccgggtcgacccacgacgtccagccacctgcagacaccacccagcaacgatggcctccaccatgacctgcaccgccctgcgcgcctcggttgccaggagggctgccccggcccgccgcggtgccgtgaaggtccaggccgcggccaagcagatcccccactggctgcccggcaccccccgcaaggactacctggatgccgctgacctgccaggcaacttctcctttgaccccctcaacctggccaccaaccccactgcgctcacctggttccaacaggcggagctgcagaacgggcgctgggccatgctgggtgttgccggcatgctgaccccggagctgggtgccaagctgggcggcttcaccggccccgccggcagggtgccatggtatgatgtgtcaactacgacttctgggccccgc

SEQ ID NO: 3143 - DNA, 455 bp, Chlorella vulgaris
ttcgccgggccacccacgcgtccgtatggatttcacttttgtgtgccccactgagatcaccgccttctctgaccgccatgacgagttcaaggcagtggacaccgaggtgctgggcgtgtcggtggactcccagttctcacacctggcctggatccagactgaccgcaaggagggcggcgtgggcgacctcaagtaccccctggtggccgacctgaagaaggagatctcggaggcctttggcgtgctgtcccccgacggcatcgcgctgcgcgggcttttcatcatcgacaaggagggcgtggtgcagcacgcgaccgtcaacaacctggcgtttgggcgctcggtggaggagaccctccgcaccctgcaggccatccagtatgtgcaggccaaccccgatgaggtgtgccccgctggctggaagcccggcagcaagaccatgaagcccgacccca

SEQ ID NO: 3144 - DNA, 432 bp, Chlorella vulgaris
aattcccgggccgacccacacgtccacccacgcgtccgccaacctctgttggcagtttgctgtataggcagacatggtatgtcccatgcggttcgtccttgcggggctgtccgcggtggtagctgcagtgctgctctatgcgagccaccagagacaaaggcaactggggctgcaagaaggctctgttgatccaagtatacagggcaagcaaccagcaccacggagcaaggcacggttaatgttggacttctttactggcaaatatctatgggacgaagctatcgtgcctttgttgaagcactgaggcttctgccctccccgctgggctcagtacatcagcggcgacgtcggagtttgcacgtcatgggcagttctgctagatgtatcgatgctccctccttgacccgcggaggccttggtggtgcacgcacg

SEQ ID NO: 3145 - DNA, 435 bp, Chlorella vulgaris
gacccacgagtccagtgtgcttgctacctgcagacaccacccagcaacgatggcctccaccatgacctgcaccgccctgcgcgcctcggtcgccaggagggctgccccggcccgccgcggctccgtcagtgtgcaggccgccgcccgccccgtgtggctgcccggctcggagttccccaagcacctggagaacgtcaagctgcccggcaactttggctttgaccccctgggcctgggcgcggaccccaagcagctggagtggaatgcggagtctgagcgcgtgcactgccgctgggccatgctgggcgttgccggcatcctggcacaggagattgtgcaccccgagcagttctggtacacctcgggcgccgagatcaatctgcccttcaacatcctgggcctggtggcgtttgagctctttgccatgcactgggt

SEQ ID NO: 3146 - DNA, 411 bp, Chlorella vulgaris
ccgggtcgacccacacgtccatgatccccgtctcgcaatagttccagggcaatcactatgcaggcaaccatgatgaagaccttcggcgccagcctgcgcaaggctgtgcccacccagggcaagggcacccgccaggtgacccgcgcctccgtggagtggtacggccctgacagggccaagttcctgggccccttctctgagggctccacccccagctacctgaagggcgagttcgccggcgactacggctgggacactgctggtctgtctgccgatccccaaaccttcgctgcctaccgcgaggttgaggtcatccatgcccgctgggccatgcttggcgccctgggcttcctgacccccgagctgctgcagaacgccggcgtggccaacttcggcgactctgctgtgtgg

SEQ ID NO: 3147 - DNA, 423 bp, Chlorella vulgaris
ccgggtcgacccacgagtccacccacgcgtccggtgtcgccgggcacagtaacagcatcccagcagccagggtcaggcgaaatggctttgttggtgcgaggcgccagaggcgctggaaagctgcagcagtgcctgagggcgtacagcactgctggagagaagacttcgtggggtgggctcaaggacgaggaccgtatcttcacaaatctctatggccgccatgaccctttcattaagggcgctgaaaagcgtggtgactggtacaagaccaaggagctagtccagaagggtcccgactggatcgtggatcagatgaagaagtccggcttgcgtggccgtggaggtgccggcttccccagcgggcttaagtggagcttcatgcccaaggtgtctgacgggcgcccctcatacctggtgggtaac

SEQ ID NO: 3148 - DNA, 403 bp, Chlorella vulgaris
cccacgcgtacggacgactcggagcaccatggcagcgatggcttccctgaccgccaggaccgccttcgtgggcaagacccactcccagccccgccaggcggcgaggaggagcagcgtggttgtggctgccagcaggcccatctggtaccctggcaacgatgaggtggtgcccccttacctcgacggcgagctgccaggcgactacggctttgaccccctgcgcctggctgacgaccccgagaaccgcaggtggttggtccactccgagatcttccacggccgcgtggccatgaccggcgttgcgggcatcctgtacacctcgctggccaatgcctccggccaggacatccccgagtggtttgatgccggcaaggtgtacgctgagacccaacccgatgtgccc

SEQ ID NO: 3149 - DNA, 439 bp, Chlorella vulgaris
gacccacgagtccagtgaaaaaaggctggggtgcatattctctatctgttcgatcgttgtttgatcattcgaagcaaaccatggtttgcccaatatgcattgccacagccatagccgccaacgcacccaccattgctgctgtggctggtggggctgcagcagccaaagcggcgaagctggcatatgataagtcacatccatcgagagccggggaggatggtggggttaggttcggaaggcccaagctagccaagctagtggcgcagacggtagagaccatcagtgcgaagaagtcgccatgaggtccgaggtagacagccgttagcagaagcagagcgtggtgcgggccgttttaccagcggaaacgagggagtacgaagtgcaaaatgaatacaagagctcaccgagcatgtacattatgaatgcccaatggtgccat

SEQ ID NO: 3150 - DNA, 442 bp, Chlorella vulgaris
ccgggccgacccacacgtccacctgtgggcaagctgctggacgagcgcgacgcggagctgcgcggcaagctgtccctggtgaaggacaactcctcacagatcgcggcgctgcaggctgaggcggagaagatcattgctgatgcccgcgccgcggcccagaagaagatcactgatgccaagaacgctgtgtctgccgaggcggccaaggacctggcggcagccaaggcgaaggtggatgctgagctgaacaaggccctggagcagctggaggctgagaaggccgccgcgttcaagtcccttgactcccaggtgggagaagctgtcagctgacatcctcgcccgcgtgcttcccgagggggtcaaggtttagtcagcccacccatcctggtgaatgtagtggaaggctggcctacctaggcctgcttagttcccccagcccgac

SEQ ID NO: 3151 - DNA, 410 bp, Chlorella vulgaris
cccacgcgtccggaggccaccaggattatcaggatgggtcgccacaaggtgtctaagagttcggcgtacttcagccggttccaggtgaagtacaagcgcaggcgccagggcaagaccgactaccgcgcccgcctgaggctgtgcacccaggataagaacaagtacaacactcccaagtacaggctggtggtgcgcttcaccaacactgacgtggtgtgccaggtggcatacgccacgctctccggtgatgtcgtcgtcagcgcagcctacgcccatgaactgcccaactatgggctgaaggtgggcctgaccaactatgctgccgcctactgcaccggcctgctgctggcccgccgggtgctgaccaagttcggtctggccgagacctacgagggcaacaccggcagccc

SEQ ID NO: 3152 - DNA, 421 bp, Chlorella vulgaris
  unsure (1)..(421): unsure at all n locations
ccgggtcgacccacacgtccagcagcagttgaggaggttgagagggttgagcaggtggaggacgtcgaggatgacgtcagtgacgatgtcagtgacgacgaggagggagaggaaggcgaggagggcgagcgcaggggcaagcagagccgctctgagaagaagagcaggaaggctgtgcagaagctgggcatgaagcctgtgccaggcgtaatgcgcgtgcagatcaagaagagcaagaacatcctttttgttatcaacaagcctgatgtgtacaagagcccctcttctgacacctacgtcatctttggcgaggccaanattgaggaccttagcgcacaggcagcaggcgcagcggctgagcagttcaggatgtgcgagcccctggcggagccacgtgctgccaaggctgttgaggcagctg

SEQ ID NO: 3153 - DNA, 439 bp, Chlorella vulgaris
ccgggccgacccacgcgtccacccacgcgtccggtggttatcgtgggcgctggctccgcgggcctctcgtgcgcatatgagctgaccaagtaccctgacgtcaaggtggccatcattgagcagggcgtggcgcctggtggcggcgcctggctgggcggccagctcttctccgccatgtgtgtgcgcaagccggctcacaagctgctggacgagctggagatcccatatgaggacgagggcaactttgttgtgatcaagcacgccgcccagttcacctccaccctcctgtccaaggtgctgtcagcccccaacgtcaagctcttcaatgccacagcagtggaggacctgattgtgaaggaggatgccgccaagggtgggcgctatgtggcgggcgccgtgaccaactggaccctggtctccctcaaccatgacacccaga

SEQ ID NO: 3154 - DNA, 280 bp, Chlorella vulgaris
ccgggtcgacccaaacgtccagtggaatcccccgtcgacaacaggtccaaggttcacaagatgcagaccctctctgcccgtttcggcgtccgcgcccctgtctcccggggcacccgccaggtgacccgcgcctccgtggagtggtacggccccgaccgcgccaagttcctgggccccttcaccaaccccccttcctacctgaagggtgagttcgctggcgactacggctgggacacctctggcctgtccgccgatcccgagaccttctcccgctacaggg

SEQ ID NO: 3155 - DNA, 179 bp, Chlorella vulgaris
aaaggttgctgtgggggggttgcaagttatgaccgagcacgtgtatcaccccgccttaaaagagttgtagaggcgtgtataacttgccagcaaacataccatcatgtttgtgttcatttaattcccaaggcagcaggtgcgaacagcttcttgtatcacaagttctcacaaaacataag

SEQ ID NO: 3156 - DNA, 430 bp, Chlorella vulgaris
ggggccacccacgcgtccggagcttgccacctgcagacaccacccagcagcgatggcctccaccatgacctgcaccgccctgcgcgcctcggttgccaggagggctgccccggcccgccgcggtgccgtgaaggtccaggccgcggccaagcagatcccccactggctgcccggcaccccccgcaaggactacctggatgccgctgacctgccaggcaacttctcctttgaccccctcaacctggccaccaaccccactgcgctcacctggttccaacaggcggagctgcagaacgggcgctgggccatgctgggtgttgccggcatgctgaccccggagctgggtgccaagctgggcggcttcaccggccccgccggcagggtgccatggtatgatgtgtccaactacgacttctgggccccgccccca

SEQ ID NO: 3157 - DNA, 446 bp, Chlorella vulgaris
ccgggtcgacccacgagtccacctggatctcaaccgtgctggcagcagctcccgcacgacctctcacccaccagtcctagcgaggttagcaggggttcaccatgaaccaggcaatctatgtctctctgtctctcattggcctggtggccattgtgggagctggtgttggtgttggtagcggcgtggcactgatcagccagcagccgcaggcgaagactgagccaaccaagcactgagtggttagttgctgtggcatacagcagcggcagcagcagcagcagctagtgctggctagcttggggaagttgcagcttttgcaaaggtgcctggccgtgtgcctacctgacggcccgggtttgggagcgcgagtgccagttctttgccaatggctggctacttctgtggcaaagggtttggcacaaagtgtcaataaggtctcggggcgg

SEQ ID NO: 3158 - DNA, 466 bp, Chlorella vulgaris
cggtccgacgcttcccggggcgccccacgcgtccgcgaccgcgtgggcggacgcgtgggttctctagccaattccaaaccctcacaagatggtcgtgctcgccctctccgccctccaggtggtggctgccaagaaggccccggccaagaagtcggccagcaagaagcccgcaaagaagtctggcggcgttgagtggtacggccccaaccgccccctctttctggggcccctcagcggtcctcccccgacctacctgaagggtgagttcgctggtgactacggctgggacacctctggcctgtctgccgaccccgagaccttcgcccgctacagggagattgaggtgatccatgcccgctgggccatgctcggcgcgctgggctgcgtcgtgcccgagctgctggacggcaccaaccacctgccctggttcaaggccggtgcccagatcttcccccacgagggcatc

SEQ ID NO: 3159 - DNA, 421 bp, Chlorella vulgaris
cccgggccgacccacgcgtccagccagcgtccgccgggcaaaacaagccaccatgaggaacgacgctggcgagattgtggatctgtacatcccacgcaagtgctcgtggaccaacaagctcatcacggccaaggaccacgccagcgtgcaggtcaatattggccacctggatgagaatggcgtgtacactggcagcttcagcacctttgccctgtgcggccaggtccgctccaagggtgaggctgatgccgctatggacctgctctggcagaagaagaaggctgagattggccagcagtgattggagcttgagcgcgggcagcacgctgctgtgcacgctgtgatgccctcggagcaaaacgggcagtgcacggtcatggcagttaccatttggcagcggcatgtgtaacaccttagccag

SEQ ID NO: 3160 - DNA, 363 bp, Chlorella vulgaris
ggggcaaacccgccgtgccgggaaaaggcggcccgcccctttcaaggggaaggggcccgggggtttcggctctgccgagggcaagactggtgcccctggcgagtatcgccccgagttccgtggtggctttggacgcggctctgcccctccccaataagcagccaacaggacatggacgatgcatcggcggcccagcagggctagactgacatgtttggaggcaagcagggttacatgctagcaagtgcagggcatgctgcatgcagccgcagttcagcaggcatagcagttgaatgacatgtcttatggcatcgggttgccctgcctgtaaaactacgctgcccaaaaaaagtctctgagatc

SEQ ID NO: 3161 - DNA, 437 bp, Chlorella vulgaris
gggccgaccaacgcgtccatgtccttcgacccttgatatcctaacgacgtcgagatggtgtcctgcactgcccaggctgcgctgcagagcactgctttcgcggctaagacccgcgtcagcagggtcacccgcagggccgtcgtggtccgggccgagaaggagaacacccagatcgaaaaggcggaccgcgttgccaagagcggcggccccatctatgtgaacgccactgatggctctgctctgtcgtaccttgacggcagccgccctggcgacttcggtttcgaccccttgggcctcctggaccccgccaccggctctggcggcttcatctcgcccgagtggctgacttactccgaggtcatccactgccgctaccccatgctgggtgcggcgggctgcatcgcccccgagatccttgcccgcgccggcgtgatccc

SEQ ID NO: 3162 - DNA, 435 bp, Chlorella vulgaris
taccggtccgagcttcccggtgcgctccacgcgtccgccaacgcgtccgaaaaaaaaaaaaaaaaaaaaaaaaaaaaaaaaaaaaaaaaaaaaaaaaaaaaaaaaaaaaaaaaaaaaaaaaaaaaaaaaaaaaaaaaaaaaaaaaaaaggggggaggggcaaaaggttggggggcttcctttgaggttaaggggactttatagttctttttaaggttcgcgtaatttcattttatgggccgtttttttaaaagtgggtgtctggtaaaaccttggtgttgggaaatttattggttttgcaaaatttacccctttggcaaaagggcttatttcctaaaaggccgtaattattgaacgttcccaaaattttcgcacctttaagggtttgtgggacgtgactggtaagggggaattaccctgtgggggtttgttgttt

SEQ ID NO: 3163 - DNA, 382 bp, Chlorella vulgaris
tcccgggccgacccacgcgtccacggacgcgtgggctaccttcagacatcgatatgcgcacctttactacacgcccctcgttccaggccatgatggcagtagggagtttcagccatcctcagcgtgacagggttcaggcgaagcctaggcccctatttacagcgcaactgagggcgggtgcctgcagaggggccacgctcgcgcaggcagggtgctgtggcgagtcccagcccattgagggggctacgcacagtcaggccacaccagccagcactggttgtggctgcaatgggagtgggaatggagcccaagagcagccgccagctggggaggctgctactcagggcgtcatccaagcatttgataacctgctgggtggtcc

SEQ ID NO: 3164 - DNA, 442 bp, Chlorella vulgaris
cccgggccgacccacgcgtccacggacgcgtgggttcatgtccttgtgactgggggagagaagtgaagtagacctgacatttggaggtggagcagtgcgagggtggggcggcggggcttgttctggagtgcatggcatcggaggcaggggctagggttatgagtatgcaatagtatgcatgggtggatgatgcactatgcatgcaatgatactgtgcttgtcgggggtttactagtctgcattgttgactggcgggtgggccggagcggcctcttccatgactctagtattagtatttgtttgcgcgtgaggttgtgcttgcctgtctgtggcccggtcgacagtcgcagctatcccatatgctctgccaaagatcttctcttgcattgcttctcggctgttggtggtgacacagcttgccaaggtgctttccctggtgctc

SEQ ID NO: 3165 - DNA, 416 bp, Chlorella vulgaris
ttcccgggccgacccacgcgtccagccggcgggcaaggcggcggctgtggccgcgctgcagcaaagagggcggcgggtggccatggtgggcgacggcgtgaatgacgcggcagccctggcgcaggctgatgtggggatcgcgatggggggaggggtagacgcagcctctgaggtggcggacattgtgctgctgggggatcgggtcccgcaggtcttggacgcgctgcagctgagccgcgccaccctgcgcaagatcaagcagaatatgtggtgggcgtttgggtacaacctgctggggctgccgctggcggcgggggcgctgctgccgctcacgggcctggcactcacgccgtccatgtcaggtgccatgatgggcttcagccctttggcggttatggccaactcgctgaccctgc

SEQ ID NO: 3166 - DNA, 479 bp, Chlorella vulgaris
taccggtccgagcttcccgggggcccccacgcgtccgcgaaaatcaattggattgatatcagagatagtgggcccccatcgaccacactgtctccaccaaattgcttgatattaacctgctactcctggcagaccgctttccgagcagctcctggcccagcggcacctctctgctagtgttgcatcagggttcacctgcccatgcttcgctcactagcagcgtctctgggccctgccctacggtgggaggtgcccttgctgaccaggggtgtcaagtccaccacaggcattgtggggttgccagtggatcctgaggcacgggagcacctgcgggagaagtacggtgcagtgttggatgcgctgaacatcattcccagcacagcagagtaccgcttggcagtggagaagactgtcaactacaagctggagatcttaaactcagaccttgtggatgaggaggtggaggacaagctgggccg

SEQ ID NO: 3167 - DNA, 255 bp, Chlorella vulgaris
tccgcacaagtgggggggctgccaaccgttacctttttggtgggcgcgacagctgcacactgcctgcaatgcgcagctttctcagtctagagcagcggccacctgtgcacaggtttatgccccgcgttcctactgtgaggcatggctagccagatgcaaagttgggccttcataactgtgaggcagtgctctgatgcttttggacctgacctgacctctctgcttcttgaatactgtaacacgaacacttcaaaa

SEQ ID NO: 3168 - DNA, 434 bp, Chlorella vulgaris
tcccggccgacccacgcgtccaggacgaggtgaccaagtctaacggccccgtcaccgagctgaagcctcaggagaagtggattgccccttaccagccgtacgcacatggctggtggaatgtgtttgagcgcaagtgaagcgccccttgcctgccgagtgcgtgtgttggcggaagtgcggggggaacagagacgcagcgttggtcacatggcgcgccgtgccccctgccttctccgtgcgtgaagagaagttagtcccacttttgcccatgggggtttttcagttgagcagcagtgaatgtgctcgctcggctgtgagtttggtgtgttgtgcgcgtggggccagtagctgcagtctttgttgtttgttcgctggcctgtctactgccggggcaccaggcccccacctgctcttgcaagcctgccccacaaacg

SEQ ID NO: 3169 - DNA, 428 bp, Chlorella vulgaris
ccgggccgacccacgcgtccacccacgcgtccgcccacgcgtccggctagcgcgataatttccgtggctgatgcctgccgaataggcaggtcttcagtaagctcaaagtaacttccgcctaatgaacccttcactaaccacacctacttcttgagagtctcggcactgtttataaaggaccacctgtgtcttctgtgggtttttctttctcaggtactgacttctgtaaccaattttgctgtcactcaaccctgctgctggctggctccattttgcttgttttggccttgttgcttttacaaagttggcaggggcagtacttgttcattgtgctttataactgtgaagtagtgtgggggcctgagaaagccctcatatgcgagctggttttgctaaaagtactgctcccccctgcccaacttcccctc

SEQ ID NO: 3170 - DNA, 451 bp, Chlorella vulgaris
tcccggtccgacccacgcgtccagcaagatggcgcggggcccaaagaaacatctgaagagattgaatgccccgaagcactggatgctcgacaagcttgggggcatctttgcccccaagccgagcgcgggcccccacaagacccgggagtgcttgccgctcatcctgctgctgaggaacaggctcaagtacgctctgacgggcaaggaggtgacgagcatcctcatgcagcgcctggtagaggttgaccgcaaggtgcgcactgacaagacctaccccgtgggcttcatggacgtggtcaccatccccaagaccgacgagcacttccgcctggtctacgactgcaagggccgctttgtggtgcaccgcatcagcaaggaggaggcggcgtacaagctgtgcaaggtccgccgcgtgcagtttggcaagggcggcgttccctacattgccacc

SEQ ID NO: 3171 - DNA, 468 bp, Chlorella vulgaris
tcccggggcgccccacgcgtccgagaacgcgtgggcgagttgtgctccgatcacacagcttacaaggcactatggccagtgtagtggcgaccgcccagatgcaggggctggctcactgcccgtttaaggccagcagcagcctgagtgtcaggaagggctctttcttgtctggcagcgcccccaagctggtggctaggaccagagccgctcccatgcgtggcaacccactgctgaaagttgaggctaggaagactgccggcgcccaagtgcaggtagatgttgacaagcccttgggcctggtgctggagcaaagcaagagcaacctgggcggccttgttgtcaagtcagccagcggcaatgcttctaaggctggtatctccgcgggtgacactgtcatctacactagcagcttctttggtgatgagctctggccggccgacaagctgggcttcacacggtccgcccttg

SEQ ID NO: 3172 - DNA, 73 bp, Chlorella vulgaris
ccaaaaggatgcaaccttacttacccgtgcatgcaacttcatagctcttcaatagtgtccccaaatttcattt

SEQ ID NO: 3173 - DNA, 364 bp, Chlorella vulgaris
tcccgggccgacccacgcgtccagtaaccaccagcacattggccacgcctccaccgtgcggagggacgcgccgcccggccagaaggtcggcctcatcgccgcccgcaggacaggtcgtatccgcggtaccgccattgtcaagcccgacaaggagtaagcgttggcaaaggaggcggcggcagcagtgcagccgtagagggctggcgggaatgggcagcggtggctcttggcggcggtgtgctggtgttgcggctgccctacctgcctttagaatcgatgtgtgcagaggtcaaatcttgcagaagaggctgcagcaaggccggttgtgtaatagggaaaacaggcaaaaaaaagctacactaac

SEQ ID NO: 3174 - DNA, 446 bp, Chlorella vulgaris
tcccggggcgccccacgcgtccgacaacgcgtccgcccacgcgtccggcttaaggagcagcttcaaccgcaagcggaggaacaggtggaggagcaggtggagccagcaccagcagcggcgccggagattaaatattacttttacaatgacatcactggagaaacgcagtgggaccagccacgatttgagatgattgatgctgagggccgcacgtactatgtcgaccctgtgaccaaggcggcaagctgggaaaagcctgactcgctctactggagggagactgtggacgcggagggaaggacatactatctcaatgacaagacccagcaggcgcagtgggagaagcccgctgcgctggggtggcgccagctggtgttacctgagcagcaggcggcggcggaggtcaagagcgagctctagaggccccgtcttgcatactcctgtgc

SEQ ID NO: 3175 - DNA, 474 bp, Chlorella vulgaris
  unsure (1)..(474): unsure at all n locations
cccggggccanccacgcgtccgcacncgcgtccgaacaggatgggcgaaaaactagctcgacagtacgtagcagcacaggagggaaccgcagagttgcacggaaaagaggagcctagcaaggttgtatatatagggcatataccacacggcttttttgagaagcagctcaaagagtacttcacacagtttggcagggtgacgaaggttcgcttatctcggagcaaaaagaccgcccgcagccgcggctatgccttcctagagttccagtcggcagaggtggcgaagattgcagcagatgccatggatggctacttgttctttgggcagaagctggtgtcacggctactcaagccagaggagtgtcatgaggacctctttaagggcgccaatcgggtcttcaccaaggtgccctggaagaagattgagatggagcggcacaacaaggagcggacaccacaggaggagcggctacg

SEQ ID NO: 3176 - DNA, 324 bp, Chlorella vulgaris
ccgggccgaccaacgcgtccacttagtagcgcagcggtttttgggctattcttgggcgccggatccctcatccactgcggccggacgcaaggttactgatgcccgtgatggcttccagtagcatgttggcgtcatacgcggcagtgccaacagtccgtcctagttgagtatctgccgtggtggatggtgctctggatataaagtgagcagcgggtgctgttcacctgacaggacaccatcggcagctcagctgcagcaccatgtcagtgtctggtatatgcagcagatgaagctggcagaggcgagcatgtgtcctcgtagcca

SEQ ID NO: 3177 - DNA, 371 bp, Chlorella vulgaris
ccgggccgaccaacgcgtccagatcggcatggtgcacaccgtgcccaccaaggtcaccggctactgcggttcagtcatggtgcgcctaatccccgcgccgcgcggcgccggcatcgttgcggcccgcacccccaagaaggtgctgcagatggcgggcattgaggactgctacacctgctcccgcgggtccaccaataccctgggcaactttgtcaatgcgaccttctttgcgctggccgccacctacggcttcctcacgcccgagctctggcgcgagaccgtgttcgccaagtcgccgctgcaggagtttaccgatttcctcagcaagcctgtggtccgcacggcctactgaacatcagacagtggcggga

SEQ ID NO: 3178 - DNA, 403 bp, Chlorella vulgaris
acgcgtccggagctccccgtctcgcaatagttccagggcaatcactatgcaggcaaccatgatgaagaccttcggcgccagcctgcgcaaggctgtgcccacccagggcaagggcacccgccaggtgacccgcgcctccgtggagtggtacggccctgacagggccaagttcctgggccccttctctgagggctccacccccagctacctgaagggcgagttcgccggcgactacggctgggacactgctggtctgtctgccgatccccaaaccttcgctgcctaccgcgaggttgaggtcatccatgcccgctgggccatgcttggcgccctgggctgcctgacccccgagctgctgcagaacgccggcgtggccagcttcggccaccctgctgtgtggttc

SEQ ID NO: 3179 - DNA, 430 bp, Chlorella vulgaris
ttcccgggccgacccacgcgtccaggtggccatgccccaaacatttacttaaagatgtcggccgccgctcataccgtgcctgaggctgtcttgaagaagaggcggagggatgaggagtgggcagcaaagaaggctgctgacgctgctgaggccagcattaaggccagggctacccgcaaggagatcttcaagcgggcggagcattatgtgaagcattaccgtgcacatgaggcggacctgatccgactcaagcggtctgccaagtccaagggcggcttttatgtggagccggaggccaagctgttgtttgtggtgctcatccgcggtatgaacgacgtggctcccaagaccaataatatcctgcaactgctgcgcctgcgccagattcacaacggagtcttcctcaaggtcagcaaagccaccatcaaca

SEQ ID NO: 3180 - DNA, 431 bp, Chlorella vulgaris
ggcgtccgcccacgcgtccgcccacgcgtccgcggacgcgtgggggcgtcacgatcaatgggcagcaacgcccatgtacccccctgcagcccagagatgacaggttgaacgcatgcccgcgctaccgctgtgccctccctgtttcatgattggcagacagctgcacttgggatacgtgagcactgtagcaacaattttgctggttgtgtgtagtaacccttgctgtgtgccccaacgtgctgcacacacctgattgtcttttctttggtggctcagggcatgatatgccatgcccagccgtatgtattccaacactgacccttttatggtatgtgagtgatatagactccctgccgtgcctccacaggaggaggcacagcctttgtaaactggctagaggataaaaaaaaaaaggcaaaaaatacctaagg

SEQ ID NO: 3181 - DNA, 312 bp, Chlorella vulgaris
ccacgcgtccgcccacgcgtccgcccacgcgtccgaaaaaaaataaccaccggactagctgaatggtaaaaagtcccttcaaactaaaggagggtcgctctacacgatctaaacaaacattaccttaaaggggcggccacccaggaggatcaacagtcacgtaaactcaaatccctgttcatagccctacaacaaggccactgaaattaaattaacgggccaccgtttaaacgccttcttacgggaaaccccttggcctaacgaactttaagcccattaggccaaaacccactttccccacagggcttacca

SEQ ID NO: 3182 - DNA, 274 bp, Chlorella vulgaris
acggtccgtaatcacgggtcgacgcacgcgtccgcccacgcgtccgcccacgcgtccgcccacgcgtccgcctggccacttgtaacggactagccataaaaaaaaaaaaaaaaaaaaaaaaaaaaaaaaaaaaaaaaaaaaaaaaaaaaaagggaagaaaaaaaaagtaaaaaaaaaaaaaaataggggagaataaataaaaaaaatatatatttcatgttaaccaaaaaaaaattaagtgcactacaattatgaaagctttctttaattaaaa

SEQ ID NO: 3183 - DNA, 388 bp, Chlorella vulgaris
gccgcccttttttcccccttcctacctgaagggtgagttcgctggcgactacggctgggacacctctggcctgtccgccgatcccgagaccttctcccgctacagggaggttgaggtgatccatgcccggtgggccatgcttggcgcccttggctgcgtcgtgcccgagctgctggaccgcaacggcaccgtcaactttggcgagaacgccgtgtggttcaaggccggtgccgccatcttcggcgatgacgggctgaactacctgggcaacccctccctcatccacgcacagtccatcgtggccgtgctgctctcccagattgtgctcatgggcctggttgagggctaccgcgtgaacggcggccccgctggcgagggccttgacgcc

SEQ ID NO: 3184 - DNA, 421 bp, Chlorella vulgaris
ccatcctgctttgttacattgatccaccataaagtacaacctctcgcagatgtcttaccaaatcatcactagcagtcaaatcttagcagcttagccataagcattgtataccaatcaccacacctcataccacagccacagccattccgaggagtggtccctacatcgactcactccaatcatgtacagtagaagccatcacaatcataactcctcccgcaatgggagctcaatgcatacaaattcagcacagctggcagggtgcagacggtaggcaatcaaaacagagggcgccccagcatgcgggggcgcggcgcgcacgatctcacaagcagctgcagtcgggaggcgcccgcccgcatattgagcggggcgccgtagccacatcatctccgcgactgccacacagacagtccccact

SEQ ID NO: 3185 - DNA, 443 bp, Chlorella vulgaris
cccacgcgtccgcccacgcgtccgaagcaacatatttgctgctggctacttaacccaggtcccctcagcttgttggagcaggagctagtcacaacagcagtcatgcagctcgcagccagcagcctgagcagccggcattgccttgtgcagcgaccattcgtggcagtcaagcctgctggccgccctgcgctgcggcccatggccgtgtgcccagtggcgaaggctaccaaggccagcgagctgaggagcctttctaaggaggatattgagcgccaggtggaggaaggcaagagggagctgttcagcctgcgcatcaagtatgccaagcgtgaggagtacaagcccagtgactataggaagatcaggaggaagattgcacagctgttgacaatcaagcgcgagcgggaattggcagaggggatgacgcggcgggatgctcgtgg

SEQ ID NO: 3186 - DNA, 455 bp, Chlorella vulgaris
ttcccggggccacccacgcgtccgcaccatggtgaagtacgctaaggaggtggacaacgccaccaaggccgccaaggcccgggggtctgacctccgcgtgcacttcaagaacacgcgcgagtccgccgcagccatccgcggcaagagcctggtgaacgccaaggcgtacctggaggctgtcattgatcacaagcgctgcatcccgttcctgcgctacaatggtggcgtgggccgcaccagccaggctaagaatgagggcaacaagatcggccagggccggtggcccaagaagagctgcgagttcctgctgggcctgctcaaaaatgccgagagcaatgcagaggtgaagggcctggacacggacgccctgtacgtgtctcacatccaggtcaacaaggcgcagagagggcgccgcaggacctaccgcgcacacgggcgcatcaaccgctacatgt

SEQ ID NO: 3187 - DNA, 383 bp, Chlorella vulgaris
gtcctcacgcgtccaccaacgacttccgcaaaaaagaacaaaaatccaaaagaagccaaagccatggctgcggacaaatgccaaacaaaggcaaaaaaaggaagtggtcaaagggcatcatgaatgagaaggtcaacaatatggtcaagttcgacaaggccacatttgacaagctgttgacacaggtgcccaattacaagatgatcactccctcagtgctctctgataagctcaggatcaaccgtagccttgcacgtgccgttatcaaggagctccttggccaaggtctcatcaacgttttggccaaaagcgcaattcacgagatctacactcgagccagcgctgctgcatgattgactgaatgtttgaacgggcatctgtgt

SEQ ID NO: 3188 - DNA, 450 bp, Chlorella vulgaris
taccgagtccgaccattcccggggtcacccacgcgtccgtacttcttcagggacgagactggatgttcgctggcgcagtgcagcagaggcttggatcggcataagtgcttgaaggaggttacgagggcttgacagcaccatgtcaggcgaaaagggaactgtcccaggctatcctcccccaggctaccctccgcccatggcttatggcccaccagggaacggatatgaccagtatcccccgccgccatctgggtatccgccgccgccccctccagggtatcctggagcgggtcccccagggtatccccagcagtatggcccgccccccgggtacccaggtgcgcctccccccatgtacggtggtggcggccagcctcagacaatctatgtgcagcagcagcagcccaaccgaccaggcgcagatgactgctgcacagcctgcttaccggc

SEQ ID NO: 3189 - DNA, 444 bp, Chlorella vulgaris
gggtcgaccacgcgtccggttgcaaacttttctgagcacctgcccctgtgaaccgcgttaggtcgattgcgtcatgagttcagctaaacagctggtggatgagacgatcaagggcaaccgtgtggtggtgtggtcaaagagttactgcccctactgccacaaggccaagcgtgcactgaaacgctacttaaaggatagccaagtcgtggtggttgagcttgatgagcgtaatgatggcagccagatccagcaggcgctgggccagataactggtggcacctctgtaccccgggtcttcattgacggcgagttcatcggaggaggggatgataccgagaggttggcaaacaatggcaagctagaagtgctgctgaaggacaagggcatcctttgaagccagcaacgctaacatccgtgtgtctgggcaagctatgcgttcgaaca

SEQ ID NO: 3190 - DNA, 144 bp, Chlorella vulgaris
aaaaaaaataaaaaaaaaaaaaaaaaaaaaaaaaaaaaaaaaagaaaaaaaaaaaaaaaagggcggacgccctagaggcttacaaccttagttgcccgggctggcgaagtgttagctcttctcaaggctcacgcaaatttattt

SEQ ID NO: 3191 - DNA, 390 bp, Chlorella vulgaris
aacttgcttcagcatcacaggcagccttgtccgctgctaacagaagaagttgcccgcatcacagcacaccaagaagacccacaaggccagccgcgcacaccacactgtcggtagttcactacatcattgcgccggcattcatccgctgacgagtacaagctcagctggcactccctattcaccaggcccaagcacgataactactaccgcgcttgctttagacataccagcaggaaagctcaactagccaaagggcggatgcctcaacaagccggcactcttttacaagttgtgaatgaccccggtgaccaggacaggcaaggaaaaagcatgacagaaagccgagcactgccagcacactcacggcaggcttgcaagccgccctatcag

SEQ ID NO: 3192 - DNA, 408 bp, Chlorella vulgaris
aaaaaaaaaaaaaaaaaaaaaaaaaaaaaaaaaaaaaaaaaaaaaaaaaaaaaaaaaaaaaaaaaaaaaaaaaaaaaaaaaaaaaaaaaaaaaaaaaaaaaaaaaaaaaaaaaaaaaaaaaaaaggggggcccccccaaaaggttcaaacctaacttacccgtgaatccaagttcaaaccccttcaaaggggtccccaaatttaaatccaggggccttcgtttaaaaacttctgaacgggaaaaaccctggctttacccaattaaacccccttgaaaaaaacccccctttcccaaccgggcttaaaaccaaaaaggcccgcaccgttccccctcccaaaaatttgcccaccctaaatggcaaatggaaccccccctgtaccgggccataaaccccggcggttttgggg

SEQ ID NO: 3193 - DNA, 102 bp, Chlorella vulgaris
gtcatttttggtacgtcatgtgtgtgtaagctccggtgttctcccttgtgcgtgtgatttcatcagaggtactgttgtttcagtaacaagttagcagcaaaa

SEQ ID NO: 3194 - DNA, 406 bp, Chlorella vulgaris
cggacgcgtgggtcctggcactgggttttgggacactctagaactgttcgggctatgcactgtgctgcctcttagtgcggcttcaaggttgtcctcatcgcttgggtaagtcaagctggggaaagggtttggggaattgctcgcgctgttgtctacttcactgctgttgtatagcccaccggccagctcttgcaacgtgcatgtgtagagagtgcttggggggtttgggttgcaattgccccgtttttttccctggacctgtagctgcctactactgacacttgcttgggagtttttagcgctgtcccgttcttgcaaactgcctcggtctgcttgtgtgctgtaatgatatctcaggcctcctgtaataacttggcaagcaaaaaaaaaaataaaaaaaagaaaa

SEQ ID NO: 3195 - DNA, 76 bp, Chlorella vulgaris
agcgctagaggatcgaaccttacgtacgcgtgtatgcaacgtcatagcgcttctatcgtgtcacctgaattcaatt

SEQ ID NO: 3196 - DNA, 429 bp, Chlorella vulgaris
ggtcaggagttcccgggtcgactcacgcgtcaggtggattctgccgacttgccgacaccgccctccttaccctgaggttgatcactccttgcgcccgtcatgtcgagctactcgaagtataacggcgggcagtacagcaatggaaccagcggcaggaacaacgccaacccaacgccgtttacgccgtaccacgctgacaaccccgtcaaccacggctggtcttaccagggctgtaacgaggcctcgaaagtggagtactaccagcgtggagacgtgaagatggactactacccaaccactggcactgtgaagacgtccatgaaccaccctagccagggcaacacccagatgttcaggcgggacctgactgacagcgagttcagcagcgtggcttacaacccccgccagcacaccggcaaaggctaccag

SEQ ID NO: 3197 - DNA, 387 bp, Chlorella vulgaris
agcccaagcgtcgtcctgcgcatttgcggacacgtcgctcgttaccctgaggttgattacaccttgcacccgtcatgtcgaattactcgaagtatgccggttggtattacaacagtggaagcaacggcaagaacaacgccagtccaatgccgtttaccccttaccaagctgacagccccgttaaccaaggctggtcttaccacagctgtaaagaagcccctaatgttcactacgaacaacctggagacctgaagatggcctactaaccaaccactggaactggtatcacgtctataaaccacgctagccacgggaagacgcatatatttatgtgggacctgactgacagggagttcagcagcttggcttataacccccgccaacaca

SEQ ID NO: 3198 - DNA, 328 bp, Chlorella vulgaris
gaattaccgggtcgagccacgcgtcagcccacacgtccgcggacgcgtgggataggtcgctcgactacttgggttttctacagtagccgaggcctaggggcgaagggtgcttcttcactcagacacggctcctgccgatcgtctgaggaaccgtgcatcatgacttcgaagttccctgcacacgcaatcacaagggagcccgcgcggacgactatagtgaacagccttaaggagatgtggccctttgttgcgggcttctctctaactggctatatcttcacaaaggttgccctgtcagtgacagatgaggatgtgaagaactcaaagt

SEQ ID NO: 3199 - DNA, 414 bp, Chlorella vulgaris
cggtcaggaattaccgggccgagccacgcgtcaggggggtgagccacacagaggatgaggccaaggagctggcagccaacattgaggtcacggacggtcccaacgaggagggggagatgtttgaccgccccggcaagctgtctgacaagctgccctcgccctacgcaaacgagaaccacgcccgctatgccaacggcggcgcctacccccctgacttgtcgctcatcaccaaggcgcgccacgatggccagaactacgtgtatgcgctgctgatgggctaccgtgagccccccgcaggcgtcacggtgcgcgagggcctgtattacaacccctacttccctgggggcgccattgccatgcccaagatgttgaatgacgagggcgtggagtacgatgacgggcacccagccagcg

SEQ ID NO: 3200 - DNA, 494 bp, Chlorella vulgaris
  unsure (1)..(494): unsure at all n locations
tacggtccgtaattcncgggtggacccacgcgtccgctcaagtactagcaggcacagcccagccaacatgggtaagaccaggggtatgggcgcggggcgcaagcttcgcctgcaccgccgtgaccagcggtgggcagacaaggactataagaagagccatcttggcaacgagtggaagaagcccttcgccggcgcttcccacgccaagggcatcgtgctggagaagattggcattgaggccaagcagcccaactccgctattcggaagtgcgcgcgtgtgcagctgatcaagaacggcaagaagattgccgccttcgtgccccgcgatggttgcctcaacttcatcgaggagaacgatgaggtgctcattgccggcttcggtcgtcgcggtcatgctgtgggtgatatccccggtgtgcgcttcaaggtggtgaaggtgtctggtgtgtcgctgctggctcttttcaggccaagaaggagaagccccgtaactg

SEQ ID NO: 3201 - DNA, 434 bp, Chlorella vulgaris
ggtcaggaataccgggtcgaccacgcgtccgggcaaaatgggcggggccaaagaacatctgaagagattgaatgccccgaagcactggatgctcgacaagcttgggggcatctttgcccccaagccgagcgcgggcccccacaagacccgggagtgcttgccgctcatcctgctgctgaggaacaggctcaagtacgctctgacgggcaaggaggtgacgagcatcctcatgcagcgcctggtagaggttgaccgcaaggtgcgcactgacaagacctaccccgtgggcttcatggacgtggtcaccatccccaagaccgacgagcacttccgcctggtctacgactgcaagggccgctttgtggtgcaccgcatcagcaaggaggaggcggcgtacaagctgtgcaaggtccgccgcgtgcagtttggcaagg

SEQ ID NO: 3202 - DNA, 335 bp, Chlorella vulgaris
cccacgcgtcagcccacgcgtccgcggacgcgtgggcggacgcgtgggcggacgcgtgggatggagtacggagtcttcctctgctttgctggccggttggtgatcacggtgctgtgtgccatcttcctgctgcctgataccaacggggtgcccatcgagcgcgtccaggcactctatgcccgccactggttctggaacagggtgatgggtcccgctgccgctgaggtcattgctgaggacgataatcgtgtggcagccgcaagcgccatcatcaaggacgaggagctgtcaaaggccatgaagttacgtctgggcagtggcgctcttatatattt

SEQ ID NO: 3203 - DNA, 262 bp, Chlorella vulgaris
ttttttttttttttttttttttttttttttttttttttttttttttttttttttttttttttttttttttttttttttttttttttttttttttttttttttttttttaaaaaattcctattaaaaaaaccctggctgaaaaaagaaaaaaaacccataaaggaaatgcgggtggtaaccccttcagggggaaccttgggaacccaaaaaaaaagttgggaaacagggggttaaacagctaaatatgttaaaccgcttattt

SEQ ID NO: 3204 - DNA, 254 bp, Chlorella vulgaris
cccacgcgtccgctgggatgttcatacccccgcgtgtaggtgttacatctttctgggtgtgatatcttggggatggagtatttcacttggcacattagcggctgagttcaagtgaagcctggcccctttgggggttttccagcgacaccacagagccggggaggctgtccagctgtgttaggcctgtcagttcagactatagtgctttgtccatgcgacttctcgtgataagtgtaacccagttgtgctaaaaa

SEQ ID NO: 3205 - DNA, 431 bp, Chlorella vulgaris
  unsure (1)..(431): unsure at all n locations
cggtcaggaattccgggtcgaccacgcgtccgcccgagttctggcgtggggccaaggcccttgtggcatcctggcgcctgataaagaactacaagcccattgagcgagtgtggatctacatgccgtacatgcatcacgaggatgtgacagaccaggaggagtgcatgcgactgtttgagggcctcggtgaagagtgtcggcagtgcgagggcggagaacccctggtgacaatgacggagctgaacgtaaagtacgcaggcctccatcgcgacgtcgtcgccaaatggggcaggttcccccatcgcaacgcgctcctgggcagggctagcacccccgaggaggaggctggcttgcttgatggctccatccagcgcttctagcctcgtttacgcttgcagcanatgagcagtcaacttactgccgccaatttg

SEQ ID NO: 3206 - DNA, 124 bp, Chlorella vulgaris
aaaaaaaaaaaaaaaaaaaaaaaaaaaaaggaagaaaaacaaaaaagaaaaaaaaaataaataaaaaaaaaagaaaagtacaaaggtcttcaaaaactgtcagaaaaattcaattcaatggctg

SEQ ID NO: 3207 - DNA, 413 bp, Chlorella vulgaris
gccacgcgtcagcatcaatcagcaatccggtacaagcgcggcagtcacaatggcgaggaccgagcagacttttgtgatgctgaagcccgatgcggtgcagaggaacatcatcggcgtggtcattgatcgcttcctgagcaagggctacatcctacgcggccttaagttcatgaacgtgactaaggatcatgctgagcgccactatgctgacctggcctccaagcccttcttcccaggcctgatcgagtacattaccagcggccctgttgtggccatcgtgcttgagggcaaggacgtggttgtccaggcccgcaagatcatcgggtccaccaacccgctggcctccgacccctccaccattcgcggccagtatgccatcgacgttggccgcaacatcatccacgggtccgact

SEQ ID NO: 3208 - DNA, 327 bp, Chlorella vulgaris
gccggaactgcttcaattgttacaccactcaggaacagtacctggacttaagtaatcttctcgttatagcaaacgtgcacaagctagcctgccaatggtcctgctgcagtatcataaatgctgcaggatccagctacaaaatcgcagccggccagctgggattccacccagcctggcgggccctacacaccaattgctgctgccacagatgccgcgactccccctggcatcatcctaacacgacagcacgcaccctagtagatagatacacagcaacagcaagctgctacccccagctgctacacatgctgatggactccacgaaca

SEQ ID NO: 3209 - DNA, 355 bp, Chlorella vulgaris
tacggtccgcacttccgggtggacccacgcgtccgcccacgcgtccgcccatgcttccgcggaggcttgggctgacgcgtgggtggtggaactatcgacatcgatgagagtagtggagtagcttgggaggtcgtcgacggtgtcggtgctctttggtggatcagagacagggggcaggatttatgagttgaccgtgaaattgattgatagcagggatgtttatctacgccagtagaaaggataggtgctaattattgttaatgtgggatcacattgtggcttgacactacagtacatagagtttgatgatcatcgaagataaatacaagatacagggattggaggtgatcgcgtt

SEQ ID NO: 3210 - DNA, 439 bp, Chlorella vulgaris
ggtcaggaattaccgggtcgagccacgcgtccgcccacgcgtccgcgcatccgcgtgcgccgcggcggccgcaagaggcccgtgcacaagggtatcgtgtacggcaagcccgcctcccagggtatcacccagctgaagcccactcgcaacctgcgcaatgtggcggaggagcgtgtcggccgcaagtgcggcggcctgcgtgtgctcaactcctactgggtaaaccaggacgctgtgtacaagtactttgaggtcatcctggtggaccccgcccacaaggccatccgcaccgacgcgcgcgtcaactggatctgcaaccccgtgcacaagcaccgcgagcagcgcgggctgaccagcgccggcaagaagtaccgcggcctgcgcggcaagggccacctcaaccacaaggcccgcccctcgcgccgcgctgtctggcgca

SEQ ID NO: 3211 - DNA, 361 bp, Chlorella vulgaris
cgccgagaccaagaagtggaagctcaccaagctcacctacgacgagcgcaagtccaacctcaaggccaagctggcagagctgacctccgagtaaaggcccaggcctgctgggtgcaagcactgccctctgagggacgggtgattttcattccaagggctgctcgcgcggcgtgtgctgccagcaaggcagcaaggattggtggtagcatggagggcacccgcagcggcggcacgagtggcggcagcggtgctggtggtgtgcgcgcttgagcagggctgcggctgcggctgcctagcacacgcagcatgtgttgggaagcacttctgtctagatgcaagtgtaaccaagcagtgaggctaa

SEQ ID NO: 3212 - DNA, 387 bp, Chlorella vulgaris
aattctcgggtcaacccacgcctccgaccttctggtcatccttccccaaccaactgcagcagcgccaacaccatggccgacaacaaggagcctcgcttcctcatctacggtggccgcaagggctggatttccggcctggtgggcgagctgctggaggcccacggtgccacttaccactttggcaaggcccgcattgaggaccgccacgccgtgctagaggacatcaaggagttcaagcccacccacatcctgaacgccgctggtgttactggccgccccaacgtggactggtgcgagacccataagattgagactatcaggtctaatgtcatcggttgcctgaccctggccgatgtgtgtctctccgaaggcctgcatatgacctac

SEQ ID NO: 3213 - DNA, 450 bp, Chlorella vulgaris
  unsure (1)..(450): unsure at all n locations
ggtcgagccacgcgtccggtggaatcccccgtcgacaacaggtccaaggttcacaagatgcagaccctctctgcccgtttcggcgtccgcgcccctgtctcccggggcacccgccaggtgacccgcgcctccgtggagtggtacggccccgaccgcgccaagttcctgggccccttcaccaaccccccttcctacctgaagggtgagttcgctggcgactacggctgggacacctctggcctgtccgccgatcccgagaccttctcccgctacagggaggttgaggtgatccatgcccggtgggccatgcttggcgcccttggctgcgtcgtgcccgagctgctggaccgcaacggcaccgtcaactttggcgagaacccgtgtggttcaagggcggtgccgccatcttcggcgatgacgggctgaactanctgggcaaccccctcctca

SEQ ID NO: 3214 - DNA, 411 bp, Chlorella vulgaris
gtaccggtctagaattcccgggccgacccacgcgtccacacggatccttgatcgtgctatcatgggtgtccaagtgcagactgtcactcctggcgatggggtcaacttccccaagaaggggcaaaaagtaacagtccactacacaggaacccttacaaatggcaagaagtttgactcctcccgggatcgcggccagccctttgatttcaccatcggtgtggggcaggtcatccggggctgggacgagggcgtggctcagatgagtgttggccagcgtgccaacctgctgatctccgccgactatggctatggggcccggggtgctggaggtgtgatcccgcccaacgctgatcttcagttcgacgtggagcttatcaagatcacctgagcaatgccagagcaatgcacccc

SEQ ID NO: 3215 - DNA, 444 bp, Chlorella vulgaris
gggtcggcccacgcgtccgaccaacctttgcaaaggttcctcgaagtctccacaatggccgccgctatgtgccagacctctgttgcccgggccttcgcccctaaggtggctgcccagaagcgccagcgcgctgttgccgcccaggcctatgttggcaactggctccccggcagcgaccgccccgcctacctggagaagctccctggtgcctacggctttgaccccctgggcctgggcactgagcccaagagcctggagcgctttgtggaggctgaggtgattaacggccgctgggccatgctgggcgttgccggcatgctcggcgtggaggccctgggctacggcgactggtacagcgcacccctctgggccgtgactggcggcaaggcgacctactttggcgccgagctgcccttccagttcgacctgggcaccctcttcgcc

SEQ ID NO: 3216 - DNA, 344 bp, Chlorella vulgaris
cgggtcggcccacgcgtccgaccaagcgtccgcagaaggtggactttgcctacggcctgtttgagaaggcggtgcccgtgagcaccgtgttcagccaaaacgagatgattgacaccatcgccatcaccaagggccacggcactgagggtgtggtgacccgctggggtgtgtcccgcctgccgcgcaagacccatcgtggtctgcgcaaggtcgcctgcatcggcgcctggcacccggcccgcgtgtcctggaccgtggcccgcgctggtgccatgggttacaaccaccgcacggagatgaacaagaaggtgtaccgcgtgggcctgaagggcgacgccagccac

SEQ ID NO: 3217 - DNA, 383 bp, Chlorella vulgaris
  unsure (1)..(383): unsure at all n locations
gggtcgagccacgcgtccgggaaagcagtgcatctgctgaggaccgaaacggacaaccatgcagattttctgcaaaacagacaggactcatgtccttgagcttagctccgaggccactgtggccgatgtcaaggctgccatcgaggccagccagggcatcccctgcgatgcgcagcgtgtgatgttctctggtcgccagctggaggaggaggcctccctggccgcctgcggcgtgtctgacgacagccagctgtacatcctgatgcgcctgctgggtggtgccaagaagcgcaagaagaagacctacaccaagcccaagaagcagaagcacaagcacaagaagatcaagctcagggtgctcaagttctacaaggtanacgaca

SEQ ID NO: 3218 - DNA, 449 bp, Chlorella vulgaris
  unsure (1)..(449): unsure at all n locations
ggtccagatatccgggtcgagccacgcgtccggcaagatggtgcagcgtctcacttacaggcggcgtcacagctacgccaccaagtccaacaagcagcgcctggtgaagacgccaggtggcaagcttgtgtatcagctgctcaagaagccgagctccatcccgacttgcccgatcagcggtcagaggctgaacggcctgcccgctcgccgccccgacaccctctctcgcatcagcaagtcaaagaagaccgtccaccgtgcttatggcggccacctcagccatgctgtcgtgaaggagcgcatcatcagggctttccctggtggaggagcagaagatagtgaaaaaagtgctcaagctgcagaaggccaatgagaaggcanctgaaaagangaagtgagcaacggcagcgcagtgttgtcgttggcagcagcggacagcgagcagctgc

SEQ ID NO: 3219 - DNA, 373 bp, Chlorella vulgaris
acgcgtccgaccaagcgtcggcctacgcgtcggcccacacgtcggaaagataccatcttggaacaggcgaggtacttttcgttccagggaagctctggatagcctacgcccaaaacccactgaactgcttggtgtaggataaggtgctgatttgcgaaatcaccaaggcgttatgtaacttttgtgtccaccaacatccagcccggcgacctgttgcattgtcggtctggttgaatctccaggctgtctgcctctggaggccatgctgatggggcagcactgacgcgctgtcaccgggtgtactgcaagcggactgtgctggctgtggagcacatttatgtacagccttgggattgggttagccagagccaca

SEQ ID NO: 3220 - DNA, 282 bp, Chlorella vulgaris
cccacgcgtccgcccacgcgtccgcggacgcgtgggagtccgtggttgtttttattgagggtggcagggaatgcgatcagaaaggaggtacggggctgacaggggtctatgcagttatgctctgtacctttgcctgagatctgagccagtagatctctcccgttgttttgtcgcctgtgcattgcgatgttgacagccgggcataggaagcagcgctggcaagtgaaagccatggtacctgtgtccatgtgaagtcgcaacggcgggaaaaaaaaaaaaaca

SEQ ID NO: 3221 - DNA, 350 bp, Chlorella vulgaris
acccacgcatccaacatggccacgccgcattgatttgtttggcaatgcaatttggtcataggtggaaggacccacgggtgcgactggcatagcccagcccgtggtgcacccaaaagaatcagcacccttcaggtgtgccacacatccatgggcggggtcaattgaatgccggctttcttaatggctgctggcctgctcacaacggaatggtgctgcattcactgcatggatggctgcaatggttggcaccaagcctaccaagctcgattctttgctgcgagtttgctttggaaaccacttggattagtgtgcttggggcacctggtgtcggcgtgtctcgtcactaacgt

SEQ ID NO: 3222 - DNA, 338 bp, Chlorella vulgaris
  unsure (1)..(338): unsure at all n locations
taactatctaaacagctagcctcgaccgtatagagggctaactagtttgggagcggcatggcgcagctgctgcactccgcttttgcagggctctgcttgaagagcagcactcctcgccgacagcagccctttgtcagcaatggcactgtccagcggctggcgatgaagagcaaaaagacataccaagtggaggttgtggttggcaacgaggaggccacagacattgccatgaagcgctttangagggaagtgatggctgcaggcgtgatttccgaggtgcgccgcccanagatatttcgagaatactgctgaagctaagaaaaggaaattcaaagaga

SEQ ID NO: 3223 - DNA, 123 bp, Chlorella vulgaris
aaaaaaaaaaaaaaaaaaaaaaaaaaaaaaaaaagggcgggggcgccagcacttcaagatttaagcttacgtacacgtgaatgcaaagtcctaccacttcgacagtgtcatctaatttcatgt

SEQ ID NO: 3224 - DNA, 429 bp, Chlorella vulgaris
cgggtccacccacgcgtccgaccacgcgtccgcccacgcgtccgcccacgcgtccgcccacgcgtccggcttcttcatccaggcacttgtgaccggcaagtctcccctggagaacctggccgaccacctggctgaccccgcctccaacaacggcttctccatcctgaccgccaccaagttcaccccctgaattcagccctgaattttgagggaaatcccctggctgctgctagttcctcgttgttctagctcttggttggttgccggtgtgtcgctgttgtgtgaaggggagaggcgtgaccccttggttgtctactggcagcagcagcagcacccagcagctggacggtcctattgagatgtgtgtgacgcggcaaaattcgtaacgcacgaagaaccgaagagagcacctttaaatcccccctgctg

SEQ ID NO: 3225 - DNA, 411 bp, Chlorella vulgaris
acgcgtccagatccgctaataccgcaactctatttggggtggcacttgtgcaatggcaacctgaaaggcctggtggaaaggttggcctgggtgcggggggtttaaaccctgaattatcctttgggttgcatactgcccggccattgaaggcacaagaggatccccaactagatccccaccctcatccttgacagagaccctgttagtccagctctgtggaacgccggccgggagaagccaggcacatggggttgtcataaagtggcgtcttcgcagcatctagctccccctcggagtaacctgcatgacgcaaatcagctgaactgggtgccggcaggcgggaacccgacagtcagcgagatgcacctctgcattgcttgcatgcccaactagaaaaactctgtcctgctc

SEQ ID NO: 3226 - DNA, 295 bp, Chlorella vulgaris
cacgcgtccgatgaagggtgcatagtggttgcacttgaacggccgagaagttgcgcgaggcctcctcgtcttcaaacatgttttggctctttcatttctcgcccacacacttgtcggagaactgccccccccttcgtttgcttgctggtttggcttacttatgaacccctaggggaatgcatttgtgaccctagggacttgctatatagacatgttgtgtgacagcactgcagcattttgtaaacatgggcagtgaaaatgtcactgttgtgtgaaggggaaaggcctaaccctt

SEQ ID NO: 3227 - DNA, 419 bp, Chlorella vulgaris
cccgggccgacccacgacgtccggcttcagccagcctttgcaaaggttcctcgaagtctccacaatggccgccgctatgtgccagacctctgttgcccgggccttcgcccctaaggtggctgcccagaagcgccagcgcgctgttgccgcccaggcctatgttggcaactggctccccggcagcgaccgccccgcctacctggagaagctccctggtgcctacggctttgaccccctgggcctgggcactgagcccaagagcctggagcgctttgtggaggctgaggtgattaacggccgctgggccatgctgggcgttgccggcatgctcggcgtggaggccctgggctacggcgactggtacagcgcacccctctgggccgtgactggcggcaaggcgacctactttggcgcggagc

SEQ ID NO: 3228 - DNA, 277 bp, Chlorella vulgaris
cggtccgaaattcacgggtcgacgcacgcgtccgcacggggccagattgcgctttgtgcaccagcgatgctggctgtgcggacatgacaggctacgctgacgcgaggtgcagcacagacctgagcttcaccgctaactcagagctcaacaacttccactgcaccatcgagagcagcaccttctcggccttcaccgtgcccgactccctcctcatccagtgttacccccagggcatgcacatgaccatggactccgtggcggacgctcccgcggggcc

SEQ ID NO: 3229 - DNA, 322 bp, Chlorella vulgaris
taccgagtccgacattcccggggccacccacgcgtccgcatgataggcgtcatgccacgctcggctgccacggcggctgacatcccagagctgcggcctgttggggatcgggtgcttatcaaggtgcaagagcagggcggcgtgacgatgggcggcgtgatcctccccgacagcgccaaggagcggccactgagtggagaggtggtgcgagttgggcccggcaagcagcaggatgatggaagccgcaaggcgccgcgggtgaagcctgaggacaaggtggtgtacttcaactgggccggggacaacatggaaaccccctcag

SEQ ID NO: 3230 - DNA, 382 bp, Chlorella vulgaris
gtcgaccgacccgtccgcccacgcgaccgcaagccccttcagcaaaagatccacgatgcagaccgcctttgtccgctccggcctccgtgccgccgtccccaccgctggcaagggcacccgccaggtgacccgcgcctctgtggagtggtacggccctgaccgcgccaagttcctgggtcccttcaccaaccccccctcttacctgaagggtgagttcgctggcgactacggctgggacacctctggcctgtccgctgatcccgagaccttctcccgctacagggaggttgaggtgatccatgcccggtgggccatgcttggcgccctgggctgcgtcgtgcccgagctgctggaccgcaacggcaccgtcaactttggcgag

SEQ ID NO: 3231 - DNA, 398 bp, Chlorella vulgaris
ggtcgaccgcacgcgtccgcccacgcatccgcggacgcgtgggcagacgcgtggcggcggcggaaagcaccaagatggccaacgacaagtcgcgctcctccgaggtggtgacccgcgagtatgccattaacctgcacaagaggctgcatggcataaccttcacgaagagggctcctaaggccatcaaggagattaagaagtttgcccagcaacaaatgaacacgagcgacgtgcgcgtggacgtcaagctcaagcaggccgtctggagccatggcatcgacaacgtgaccaaccgcctgcgcattgtgatccaactcaagcgcaacacggacgacgactataatgaggagatgttctccctggtcaccctggccgaggaccagagcagcaggggcaag

SEQ ID NO: 3232 - DNA, 341 bp, Chlorella vulgaris
cccacgcgtccgcccacgcgtccgggccgacgaccccgacagcttcgctgagctcaaggtcaaggagatcaagaacggccgcctggccatggtgtccatgcttggctttggcgtgcagggcctgctcaccggcaagggccccctggagaacctggctgaccacctggctgaccccaccgtgaacaacggctttgccgtggccaccaagttcacccccggcaactgagctggttgtcttgacggacgtttggctgtgctgcttgacaggctggaggtcagcattactatgctggccttgtcttgagaagaaaatccttgtgtaactagctaaccatcaacaa

SEQ ID NO: 3233 - DNA, 399 bp, Chlorella vulgaris
cgggtccacgcacgcgtccgggatccggcaaggaagcaagatgccgatccagggcgggcacaagtaccaccagtatcaggtggtgggacgccaccttcccacggagagggagccggagcctaccgtgtaccgcatgaagctctgggccagcgaccctgtcagggccaagagcaagttctggtacttcctgaggaagctgcgccgggtcaagaaggccaatggccagatcctggcatgcaacgagatctttgagaagcaccctaccacggtgaagaactacggcatctgggtgcggtaccagtcgcggactgggtaccacaatgcgtacaaggagtaccgcgacaccaccctcaacggcgccgtgtcgcagctgtatcaggagatgggctcccgccaccg

SEQ ID NO: 3234 - DNA, 277 bp, Chlorella vulgaris
ggtcgacccacacgtccggcttcaccgacgacctgcgcgacgactacctggagtggaagcgcgagggccgcctggtgaacgatggcgtgaacgtcaagctgctgggctgcaacggccccctggagaatcgcgagtctgcgcagatcttccccacgccggcccgcctctaatggactcccgtgcacggctctgacgacgagtgacagcgcccccagtcacagcagcatgggcgagcatggctggggcgtggcagcgctggcctgggtcaccatcccgg

SEQ ID NO: 3235 - DNA, 249 bp, Chlorella vulgaris
cggacgcgtgggcgcccgcattcggcgtgcgctgacactgagaattggagtccttgagcttgctatcatttccacaacacacgtactgctccctttttatgtgatgccgtggctgtgtggatccaagggacagtgtattggctgacactgaactatataacgagtgagttcatgctccggtgtcgatgttatcatcagtgacttgaaaaggaacaagtagcagaagaaaggacgagcagggcaggagag

SEQ ID NO: 3236 - DNA, 423 bp, Chlorella vulgaris
  unsure (1)..(423): unsure at all n locations
taccagtccgaaatgcncgggtcgacccacgcatccgccgggaatcgagttggccttgagccgacgcgtttgacgcccgcagcagcacctaacacacgcaccaggcaccatgctcatctccaagaagaacaggcgtgaggtgtacaagttcctcttcaaggagggtgtgctgtacgcggagaaggacttcaacctgccggagcaccccgagattgagggggtgtccaacctggaggtcatcaagctgatgcagtccatgaagagcaaggacttggtcagcgagcgctatgcctggcgccactactactggttcctgacggacgcgggcatcgagcacctgcgtgagtacctgaacttgcccagcgagattgtgcccgccacactgaagaaatcgaccaagcctctggagcgggagggcgcacg

SEQ ID NO: 3237 - DNA, 441 bp, Chlorella vulgaris
cccgggtcgacccacacgtccggaagctgacaacgctggtcagctgtgtgggcggcgccaacgacatcggtcgtcacatcagcgactatgctgagcagaacaaggcagacatgctggtcatgggcagccgcggcctcggcacagcacgcaggtgagttgcaccgcaaacggggcacatcctgggcgtgcgggctgcctgttcactctcacatatcctcgtccaggctccctacacccccccctactgtgggtgcgacagcgaagttgccagttcctgtgaatgctttgcgactgtgtcaggaagggcaggggttagttcttggggatttgctccgttagtgactgcaaacgttgcaggcaaggctgtcggctggctgctgcacaatgcctgagccctttgctgcctgcctgtctgctgcaagaccatgctggggctgtttg

SEQ ID NO: 3238 - DNA, 363 bp, Chlorella vulgaris
gtccgacattcacggggccacccacgcgtccggattctgcggagggggcagctggttacgcaccttggctgttggtgctgccaagccagttttcagctgcctgaagagttggactgggaaggttgttttgggatactaggttctgctcttgctataacctgccatcactccctatcttcgagtatcgttgggttgggcatattctgggcagtagttgcctggtagcttttgcttgacccgtcatacgcactgcctgcatggtctctggagtgcacagctctttctgcgcaccgcagcacgggttttccccatcgctcgctggctttgcttgcaagccggtccacactcattatgtcacctgtg

SEQ ID NO: 3239 - DNA, 346 bp, Chlorella vulgaris
gtccgacattcacggggccacgcacgcgtccggattgggcctgcgggtccacttgctcgccccaagcttcccacgcagactagcagcaatgcgcggtcttacgtcccttgccacgcgtatcaggcgcgctcccggcaagcagctgatgcagaggcggggcatggctgctgatcctcatggagaggtgaagttgaacgcctgggacgctcccttggagatccccaagtggaaggaggaccacatcgtgttccttgttctgaggcggctggggcgtcggcatctcggcgcgcatgaacgcatttcgtggcaagaaggaggagcctagtaccgttgttttgactccctg

SEQ ID NO: 3240 - DNA, 316 bp, Chlorella vulgaris
tccacccacgcatccggatacttcgtcaggctctgcctcacgcactgcataccgcacctcaaaacgcagccacagacgcaaccaaggtcagcaatgcggttaacctttctgcccagatgttccaaaacaccgacgacaccatcatgatcaacatggtgactgacactgtcattggcactgtcctgggcacttcgcggcacatgtggcagcagtcatagaactagacatagcaccatcattacgaagatcattccgcccagctttcatgcacgtattgactgacgtgtagactgccggtcacagcacagtccgcttc

SEQ ID NO: 3241 - DNA, 367 bp, Chlorella vulgaris
gggtccacccacgcgtccgcacacgcgtccgcccacgcgtccgggaggctctcaggaaacaggccgccaacgccatgaaggcggtggagctacgctctcgcaacctcctggaggggggcctgcttgccggcaagacagtacgggggacccccatggcaggcacgaggctgactagcatggcgggctgcggtaatccgggggcgggcccaggccaggtcccggccagcaacccaatgtctgcgacgccgccagctgcgtgtgctgtcggcgcgcgcgcgaatcgtatctcggtggcaggaatgggcagcattgcagcgctgggcgggattggtagccccagaaagacacgtgcctgagattgtcaggg

SEQ ID NO: 3242 - DNA, 370 bp, Chlorella vulgaris
gtaccagtcctacattcccggggccacccacgcgtccgcacacgcgtccgcccacgcgtccgcccacgcgtccgcacggtgcttgggatagctgcaggggtgtcaagcaggcatccgcaccatgcctttcaagaggtacgtggagattggccgtgtggccatgattaactacggccctgagtacggcaagctggtggtcatctcagacgtggtcgaccagaacagggccctgattgaccggcccgacgagacccgccgtgtggagaacttcaagcgccttgcaatcactgacttcaacgtggagattcgccgcctggccaagaagtccgtgctgaagaaggccctggaggaggctgatgtgttcaacaag

SEQ ID NO: 3243 - DNA, 262 bp, Chlorella vulgaris
ggtcgaccgacgcgtccggaggtgtgtcccgcctgccgcgcaagaccatcgtggtctgcgcaaggtcgcctgcatcggcgcctggcacccggcccgcgtgtcctggaccgtggcccgcgctggtgccatgggttacaaccaccgcacggagatgaacaagaacgtgtaccgcgtgggcgtgaagggcgactccagccacaaggccaccaccgagtttgatgtgaccgacaaggacatcacgcccatgggcgggcttccccac

SEQ ID NO: 3244 - DNA, 438 bp, Chlorella vulgaris
ggtcgacccacgagtccggtcagcctgggtggaaggctccgtccctaacagggcgcaacctgcctcggatcctgactggggatagactaccacacaaggcggaccacctgctgtcttgttgaaccctgtaaaacctgctggggacacgctgcatgaggctgacgactggggtgaagatgggtggagtgactttgcagacgcagcattgcctgggcccccatccgtatccatgtatcctgtgccaggctctgtggcaagagaggttggggatgaactacgaggggatacactggtagttgaccagcgacggactggccattgcacaagcaccagtgctggaggtgtgtgggaacatatgcagactgcttcagtggatgctatcctggcccagatgccggatctctctttcatgttgaaccctaacctagtaaggccctg

SEQ ID NO: 3245 - DNA, 413 bp, Chlorella vulgaris
cccgggtcgacccacgacgtccggctcttgcattgctaggtttgtcttgagcttcgcccgacaaaatgtcgagccaacttgtgtgggagcttgtgaagcacaacaacgcattccttgtgaagggcgtgaacggcaccgtgttcagccgggaggctggtaacctgtataaccgcaactcctacaagtattctggcctggccaacttcaactccactgtggatgttgctgcggctaaggatggcggggtgcaggtgtccaagtcccgtggcaagaacgccagcaagcccagcgctgcccgtgctgtgtctgtaatcaagaagaacgctcgccgcaccaactacgctgtcggcgctgaggcgcagcgcgtgcgccccgacctcaagaaggctgccgttgcccgtgcctccgccgtc

SEQ ID NO: 3246 - DNA, 420 bp, Chlorella vulgaris
ccggtccgaaatcacgggtcgacgcacgcgtccgcccacgcgtccgcccacgcgtccggttcgtgtggagggcaagccagttctcttgttctggtatcgcaaccagatatatgctattgaggccaggtctccagccgaaggcgcctacagtgagggctttgccaacgccaagttcacgcaggactactgcattgagtgcccctccaccggcacgctgttctcgctgaaggacggcaccatcgtgagctggtaccccaccaaccctgtgctgcgggtgttgacaccccagcacacctgccgcaacctggaggtgtaccccgtcaggctgacacaggaggccattgaagtggatgtgtccggcagctccagcgggggccggctcaccaagggcgggtcagacacgtcgctggagaacacaat

SEQ ID NO: 3247 - DNA, 357 bp, Chlorella vulgaris
gggtccacccacgcgtccgcacacgcgtccgcccacgcgtccggactagttctagcccacgcgtccgaaacggacaaccatgcagattttctgcaaaacagacaggactcatgtccttgagcttagctccgaggccactgtggccgatgtcaaggctgcgatcgaggccagccagggcatcccctgcgatgcgcagcgtgtgatgttctctggtcgccagctggaggaggaggcctccctggccgcctgcggcgtgtctgacgacagccagctgtacatcctgatgcgcctgctgggtggtgccaacaagcgcaagaagaagacctacaccaggcccaagaagcagaggcacaagca

SEQ ID NO: 3248 - DNA, 326 bp, Chlorella vulgaris
gcccctgccggtaccagtccgaaattcccgggtccacccacgcgtccgcccatgaacgccctgattcgagggctgcgcagcagccttacctcggaccttcagcactttgccagggctgcagccacggccactgcggggcaggcgactacagctgcaaacgttggaaagccaaagcttgagaaggaatttcttgtgtacaggtggagccctgagagcgaccagcctccgcgctatgactccgacaacgttcacatcaacgcgtgcaggcccatgatgctggacgtgcggctgaagatcaacgactagcacgacgacactctatcgct

SEQ ID NO: 3249 - DNA, 359 bp, Chlorella vulgaris
ggtccgacattcacgggtccacccacgcgtccgcccacgcgtccgcccacgcgtccgggtgagtggacgacggcgttttgctggcagctgtgctaggtgtcacctgcctttgtggtccatgtgcgcagtgcgccctccagttggttttgccagtttcatccctcagccggcagcttggtgcttagctagctagccagttagttagcaagcagggctcatctcccgggcaagtggtgccctagggggggttgagtggcagatatttgattcgttttgcccttgagcttcaagatccatgccaggagatgcgcagcacgcaggcggactccggtcttgctgtcatttcgttgccacggtgc

SEQ ID NO: 3250 - DNA, 453 bp, Chlorella vulgaris
ccgggtcgacccacacgtccggccggttctcgacccggtctggtcctgctggtgaacagtgcacaatgccgtctgccaccaagctcgtcaagaaggaggcgtacgacgccaagctgtgcgagctgctggacacccacaccaaggtgttcctagtccatgccgacaatgtgggctccaagcagttcatggatatccgtgcggccatccgcggacactccaagattttgatgggcaagaacacgctgctgcgccgctgcatccgcctatactgcgagcgcaccggcaacgaccactggctgggcctgctggactacctggtcggcaatgtcggcctggtcttcacccagggcgacctcaatgaggtgcgcacgcaaatcggtgagttcaaggtgggcgcccccgcccgcgtgggcctggtggcccccaacgacgtgaccatccccgccggcaaca

SEQ ID NO: 3251 - DNA, 428 bp, Chlorella vulgaris
tgcccgtgccggtccgaaattcacgggtcgacgcacgcgtccgcatgctcaacaagaagatccacgtgcacaccctgctggacgcactcaacgactttgctgaggtgcccgagcgcaagaccgacgcgcccctgcgcctgcccatctctggtatctacaagatcaagggtgtgggtgatgtgctggcgggccgcgtggagcagggcattgtcaagcccggtgacgaggttatcttcctgcccacccacaccgccgccaacccctgcatcggcaaggtcttcaccgtggagatgcaccagaagcgcgtggacaaggccggacccggcgacaatgttggcatgaacgtcaagggcctggacaagggcaacatgccccgcactggtgacgtgatgattctcaagtctgacggcaccctgaagcccgtgaag

SEQ ID NO: 3252 - DNA, 367 bp, Chlorella vulgaris
gtacgagtccgaaattcccgggtccacccacgcgtccgcgcaacggcgggcaagtaccaaccatgaagctaaatattgcatacccggccaccggctgccagaagaagctggacgtggacgatgatgggaagctgcgtaccttctttgacaagcacctttcccagtgaggttgagggcgacgccttgggctaggagttcaggggctacgtgttcaaaatcaagggctgccagtacaagcagggcttccccatgaagcagggtatgctgacctccggccgcgtgcgcgtgctgatgagccccggggaccagtgcttcctcggttacggccgccgtaacagcgagcaccgtctcacgtcggtgcgcggct

SEQ ID NO: 3253 - DNA, 284 bp, Chlorella vulgaris
ctggcttcaagggtggcaggcatggctaagccgctgcttgcatgtgctgcctcccatcaggtggagtgaggcattgacgaagcctgagaagcgtgcaatacgttttaagcgctctgcttgggactcccagtatcgcttgttgagttttggtgcatgtgacctttcttccagtacaccgtgatgagggtgcctgcccctcctaggtttgctgaagaactgcatgtcttgcagcgtgacaatggatttttcgtcgaattttttgttacatcttttattgtgaaaaa

SEQ ID NO: 3254 - DNA, 468 bp, Chlorella vulgaris
aggtacaggtcaggaagtcccgggtcgacccacgagtccggcagtgcctatctaccctcacaccgcagcctcacaagcagccatggccggcaaggaggttatccgtgcggcccagatgtttacaaagacgggccaggccagcaaggtcagcgtggtgaaggagattgttattggcacggtcctgggcactgcgctgggcatgtggtggcagacgtggcattggtcagagaacaagaagtgggaagatcattacaaggcgcttgcggcccagaagtgagggacttgttggctgctggttagagcgcctgtctctgcaaggtctgcttacggtggagcggcatggaatgttcagggtcagcttgggagtctgggctagaaagaggtggatagaggccgcagctgcagaggggcgccccaaccgccagctagagcgtacatatggtaccttactttgtgttacttgagcca

SEQ ID NO: 3255 - DNA, 475 bp, Chlorella vulgaris
aggtataggtcaggaagtcccgggtcgacccacgacgtccgcccacgcgtccgcccacgcgtccggaactgaggaagcagtgggctcagcagcgcctggctcgcctggagcggagggcagccaaagaggaagagaagcggcttcagcgtgaggcagccaaagcacagcgagcccagcaggacgccgcggccaagcaggcgaagttgcagctgctactggagcggcaggcggctgagcgggagatacatgcacgagccaaggtggagcgtttgaagcgacatttcttgcggcaggaggtgctggaggtggccctggaagagcggcgtttacggctgttggaagagagcaagaactggatcacagcagacaccctggacatgaggatcaaggaggcacttgacaacccagtgccgctgttcccatccgccgagcagcagcagcagcagcagcagccgcatgcagccgcgtcaggggc

SEQ ID NO: 3256 - DNA, 302 bp, Chlorella vulgaris
ccgggtcgacccacacgtccgcatgccttctgctcccagcgtccctgtgctgccttgtttgtttcctggctttctcgtgtcacttgagccgctcttactgctggtactacgtgctttgattagtaatcccgaaagtgctggcttttgctcgaacctaagcaagagccagccataatttccaagctggctgtgactttgtggagtgggcgcctctgcatgagtgggttgtaggcagttgggctcactcgcttcctcacatgatgtggagtcctaatgctatggctttgacaccatggaccgcc

SEQ ID NO: 3257 - DNA, 408 bp, Chlorella vulgaris
tccgagattcacggggccacccacgcgtccgcagacgcgtgggcggacgcgtgggtgaaccccgtggagcatccccacggtggtggtaaccaccagcacattggccacgcctccaccgtgcggagggacgcgccgcccggccagaaggtcggcctcatcgccgcccgcaggacaggtcgtatccgcggtaccgccattgtcaagcccgacaaggagtaagcgttggcaaaggaggcggccgcagcagtgcagccgtacagggctggcgggaatgggcagcagtggctcttggcggcggtgtgctggtgttgcggctgccctacctgcctttagaatcgatgtgtgcagaggtcaaatcttgcagaagaggctgcagcaaggcccgttgtgtaatagggaaaccagacc

SEQ ID NO: 3258 - DNA, 385 bp, Chlorella vulgaris
taggcccatctgtagcggcagccaggcacgatggtgcagattggcaagaaggctgctagcggccctaagaagggcaagaaggccctgaccttcaccatcgactgctccaagcctgtggaggacaagattatggagattgcctccttcgagaagttcctccttgacaagatcaaggttgagggcaagacaggcatcctgggtgacaacgtcaaggttgtgcgcgagaagaccaagatcacggtgaccagcgagattgccatgagcaagcgctacctcaagtacctcaccaagaagtacctgaagaagcacaacgtgcgtgactggctgcgtgtgattgcgtccaacaaggaccgcaatgtatacgagctgcgctacttcaacatct

SEQ ID NO: 3259 - DNA, 447 bp, Chlorella vulgaris
  unsure (1)..(447): unsure at all n locations
ccgggtcgacccacacgtccgggttggtggaagggggagagccgcaaaaatggcgtcggacaagaaggctcagaaccccatgcgcgagatccgcgtcgcaaagctcatcctcaactgctgcaccggcgagtctggtgatcgcctgcagaaggcggcaaaggtgcttgagcagctgaccgggcagcagcctgtgtttggcaaggcccgctacaccgttcgccagtgggccatccgccgtaacgagaagatctcctgccacgtcaccgtgcgcggggagaaggccgtgcagctgctggaggccgggctcaaggttcgggagtacgagctgcttcgtcgcaacttctctgacagcggcaactttggctttggcatcaatgagcacattgacctgngcatcaagtacgacccctccaccggcatctacggcatggacttctacgtggtgct

SEQ ID NO: 3260 - DNA, 432 bp, Chlorella vulgaris
cccgggtcgacccaagacgtccgcccacgcgtccgcggacgcgtggggaaatcatatcctcaccaacttgaccggaactgcaggcgtgtgcttctggcacccttgcccggctcgcaaccaaaaaaagggaggcaactcccaccaaaaaaagtatagcgcccgtgtcccgcctccagtcagccgggacactctatagcagcaactagtggcagcatggcggctcctggtgctgcggtggaagtgggcgctcagcccactggccctgtgcccgtccccacgcccgctctatctaactccagcctgtatgtgggcgacctggaccgcgatgtcaccgaggcccagctgttcgaggttttctctcaagtggggcctgtggcttccatccgcgtgtgccgcgacgctgtgacccgccgctcgctgggctatgcctac

SEQ ID NO: 3261 - DNA, 374 bp, Chlorella vulgaris
  unsure (1)..(374): unsure at all n locations
gtccgacattcacgggtccacccacgcgtccgcattgccaaggagccccgcaaggtgatcaaaaagtcgtctcagaagacccaggcccgccgcagcagcctcaagacctttgtcaagggcgtgaactaccagcacatgatgcccacccgttacaccctgaatgtggagctcaagggcgttgtcccagctgacgtgcttgacaactccaccaagaaggaggaggcacgcaaagcagccaagggcctgtttgaggagaagttcaagagcggcaagaacatgtggttcttctcgaagcttcgtttctgatgagctgcatcagtgaggcagcctctctgccaggcctgtaggtcaaactgagtcattgtcngcggctg

SEQ ID NO: 3262 - DNA, 448 bp, Chlorella vulgaris
ggtccgagattcacgggtccacgcacgcgtccgcccacgcatccggattttaggcgatcctgaaaacaagcacgatggccaaaatcaaggcccatgaactgcggaccaagagcaaggcggacttgctggcccagctgaaggaccttaagcaggagctgggtgcgctgcgtgtctccaaggtcactggcggtgcccccaacaagctctccaagatcaaggtggtgcagaagtccatcgcccgcgtgttgaccgtggtcaaccagaccacccgcagcaagctcagggacgaggttgccggcaagaagtacgtgcccctggacctgcgcgtgaagaagacccgcgccatgcgcagggcgcttaccaagcatgagaggaccgtccggactgataagcagaggaagaaggacgcagccttcccccgccggaagttcgctctcaaggcctgagc

SEQ ID NO: 3263 - DNA, 361 bp, Chlorella vulgaris
ggggccacccacgcgtccggagggcaagatggtgcagcgtctcacttacaggcggcgtcacagctacgccactaagtccaacaagcagcgcctggtgaagacgccaggtggcaagcttgtgtatcagctgctcaagaagccgagctccatcacgacttgcccgatcagcggtcataggctgaacggcctgcccgctcgcggccctgacaccctcgcgcgcatcagcaagtcagagaagagcgtccaacgtgcttatggcggccagctcagccatgcagtcatcaaagagcgcagcatcagggctttcctgctggaagagcagaagatagtgaacaaggtgctcaaactgcagaacgccaag

SEQ ID NO: 3264 - DNA, 455 bp, Chlorella vulgaris
aggtataggtcaggaagtcccgggtcgacccacgacgtccgcccacgcgtccgcggacgcgtgggtggaaccttttcaccagcaggtgcgtagcttactagcagggcgagcctaagcggccaaggtgcctagatggcatataacatggtatggccattctgctgccatcttcaggcccacaatactgcttgttgtgggttatgtgaaggcttgggtgcaatactgagcagtctttggggctgaatgtgctcaatgcatgtgcagacaatccgcagtccctagatgtaagcaccacgccaaatcgtttggtgtatgccatcttaccttcacaagtgagcagcatcagatggaagaggagtgctcttcattcaggaagcacgttgagtggcacgtgagcaaaggcgtgggtgcaacagtgcccatagtggtttatatcagcacaccttggcgctatg

SEQ ID NO: 3265 - DNA, 415 bp, Chlorella vulgaris
aattcccggcctcgacccacgcgtaagggcagctcgactgcaccatggcgacccccatctccaagaagaggaagttcgtgcaagacggcgtgttttacgctgagctcaacgagctgctcaccagggagctggcagccgatggttactctggtgtggaggtccgtgtgacacccatgcgcacggaaatcatcatccgtgccacccgcacacagaacgtgctgggggtcaagggacgccgcatccgcgagctgaccagcgtggtgcagaagcgcttcaagttccctgagggctcagtggagctgtatgctgagaaggtggccaaccgcggcctctgtgccgtggcccaggcagagtccctgcgctacaagcttttgggaggcctggccgtgcgcagggcctgctatggtgtgctgcg

SEQ ID NO: 3266 - DNA, 364 bp, Chlorella vulgaris
cccgggtccacccacgcgtccggacacggcgtcggaggaggagcgttactccgctgaggcacagttcaagccggttggagaggcctacagtgtgttgtcggatgccaacaagagggccagatattaccaagggtgttcgctcgaggacattgagcaagggtgctacatgggccgccgctgcggctagcgcatgctcggccgccgcattgacccggacatcctctttgccagcatgtttggctgtgccaggtgccgctttggccgccgcggctacaacaacttccctgggggctaccccggcatcgcattccctgcctggcggcggcagcttcaatggcggaattccgaggtgttatcgtcggtc

SEQ ID NO: 3267 - DNA, 418 bp, Chlorella vulgaris
ccacgcgtccgcccacgcgtccgcccacgcgtccgagacaggccagcccaaggacatgggcagcgaggggagatggcgctgcacttcattgagaagtacggcatgatggccgtcaaggtgccctccaagttcgacctgcgacgcttttgcagagccacgggcgccaccgcacttgtaaagctgggcaccccttccgcggaggagctgggcctggccaagaagctgcacctcaccgagatcggcggcaccaagtgcatcgtgctgcagcaggactccagcctgggcgcgatctccacggtggtggtgcgcggcagcaccgaccagatgctggacgactttgaacgcgccgtggacgacggagtgaatgcgtacaaggcgctgtgccgcgacgcgcgcaacgttgcggcggggggggcca

SEQ ID NO: 3268 - DNA, 464 bp, Chlorella vulgaris
ttccgggtccacccacgcgtccgcgccctttttttttttttttgtcgcatcccttacgcacgctgtcaggcagcagctgtcaaggcagttcacagtcaaccaacactcgcgacgagcaggtcaacagaagaacagaacacaggcggccgtcacaaggtcactggcaagttcttatgagcagcaaacaagccgggcttgtcaacatcacaacataaaaaagtgcatattcttcaccgtgcacgtgaaataagaatgtgtggggttgccaggcacggcatgcacacctggctagctgccgtccccgccaccacatatctggcggcggggccggcaagccccccgccacaaagccagcgcaggaggcacaagcaggggcaagccagcgcaggaggcacaagcaggggcaaaaatacgccaggaggttgctcggccgcctaaaatttccccaaggcagccgaccaacg

SEQ ID NO: 3269 - DNA, 148 bp, Chlorella vulgaris
aaaaaaaaaaaagaaaaaaaaaaaaaaagggcggacgcccaaaaagataaaagcttaaatgggcggccgcgccaaaggatacaacctcaagtacgctctgcatgcaacgtctcagcgcttcgacattgtacacgaaattcactgcaaa

SEQ ID NO: 3270 - DNA, 325 bp, Chlorella vulgaris
ccgagtccaccacgcgtccgtacggatgatatcggcacgaaccttcaatatgccgaagacggtcgtggttgattgccggggccatatgcttggccggctggcgagcatcttcgccaatcagctgcgcatcggtcagaatgttgtctgcgtgcgctgcgaggagatgaccatctcttgcggcatggtcaggcggaaaatgcagtacgagcgcttcctgaacagccacatggttatcaaccccaggagggctgcctagaagttcagggcacccgcccgcatcatgtggaggactgtctgcggcaggatgcctcacaagacctcccgc

SEQ ID NO: 3271 - DNA, 189 bp, Chlorella vulgaris
acgcctgcagtacggtccgagattcacgggtccacccacgcgtccgcagacacttgacgcgacgcatgggactaacattagctacatgcatgcacaacgccaaccatctacaacgcacacattggccactgcacccttcatcagggcggtatccggcccatgatcattctaaagcacgtccggccctga

SEQ ID NO: 3272 - DNA, 286 bp, Chlorella vulgaris
gaattcccgactcgacccacgcgtaagtttaatttgcgacatgctcgggtcatcgttgctgcgtgtagcgggtgctgcccctaggctcgcaggaccaaggtgtcaaactgctaggcaactctcatcccaggcgagccgggctttgacaagcctagtgacccccagcgaggcgcggtggcaggagccacagccccagcggtcgtcccgtggtagggcctatgccggctttgcggggcaggaggctggatttaagagtgccacctgcacagaagttagcgaggaggtt

SEQ ID NO: 3273 - DNA, 373 bp, Chlorella vulgaris
cccgggtccacccacgcgtccggagcagggcattgtcaagcccggtgacgaggttatcttcctgcccacccacaccgccgccaacccctgcatcggcaaggtcttcaccgtggagatgcaccacaagcgcgtggacaaggccggacccggcgacaatgttggcatgaacgtcaagggcctggacaagggcaacatgccccgcactggtgacgtgatgatcctcaagtctgacggcaccctgaagcccgtgaaggacttcaccgcccagatccagaccctggacatccccggcgaggtcaaggcgggctactcccccatcggctttgtgcggtgtggccgcgccgcctgcaggatttccaagatcaactggaaa

SEQ ID NO: 3274 - DNA, 297 bp, Chlorella vulgaris
cccgggtccacccacgcgtccgcacacgcgtccggccgcggtaggctgtgcctcgcttgccccagcattgctttcttgtgaagtgttcctgataccttcccaatccacagctttggctcaaggacgactggtcgcgtgctgcatgcaagcatgttaggcgggcacttggctgtgtgagtgcctggagcccctgccccaaatcttgtcgaggcagtccaggtgccttggtacacctctcatcagagtagaggcagcaaggctgcctgggaaggcgtcagtctgtagcgatactacaag

SEQ ID NO: 3275 - DNA, 333 bp, Chlorella vulgaris
ctccacgtgtgttacacggtcatcggccgtgccgtcccaaacggagcatgcacgatcgccagccaaccagccggcgccatctatacgccggggatgccagtgcactgcccagcacatcgctcagagcgcgtgccctgagctggtgcagagcatgcccagcagagcatgcgctcagcggctcttcaggtacacctgcagcatcgccaggccctcaatctcctcgccgtattcggtgaccacggcgcatgagcacccgaccaccttgcgcacctcgccctcgctgtcaatcttgcacaggcctgcccactggcccacggtcttggggtcgggcac

SEQ ID NO: 3276 - DNA, 421 bp, Chlorella vulgaris
gggtccacccacgcgtccggatgcagggcgcgttgacaaaatggtgaacgtgccgaagaccaagcgtgccttctgcgctggcaaggagtgccgcaagcaccagatgcacaaggtgacgcagtacaagaccggcaaggccagcctctacgcccagggaaagaggcgttacgaccgcaagcagtcgggttatggtggtcagaccaagcctgtgttccacaagaaggctaagaccaccaagaagatcgtgctgcgcctgcagtgccaggtctgcaaggccacccacatgcacgccatcaagcgctgcaagcatttcgagatcggtggtgacaagaagaacaagtctgccatgtactaagcgcatcaacagcaccagcttggttgagactagcagcatataggatgtaacttctctctcagcaaa

SEQ ID NO: 3277 - DNA, 296 bp, Chlorella vulgaris
caagccttcgacaaatccgtcggaaacacacgtcaacaacaagtccaaggttcacaagaagcaaaacctcacagcacgtatcagcatccgcaccccaagtcacccggggcacccaccaagtaacccacacacacaataaaataaaagggcggccaccccaaagggtccaagcttacttttcattaaacgcaattccaaacccaccggtaagttcccccgcaactacagctgggagacctctgtcttaaccgccgataccgagaaaatcccgcgctacaccgaagttaacgccatcc

SEQ ID NO: 3278 - DNA, 388 bp, Chlorella vulgaris
cccacgcgtccgaacgacagcaatggcttccaccatgcgcgccaccaccatcaaggtgtctgctgcccagagggcctccgtccgccccgccaaggtggccgtctccgcctccctgcgcactgaggtggccaaggtcgccaaggctgccggtgtgtccgtcgcctccctggctctggccctgtccgccaatgctgccaccatcaagatgggcgctgacaacggtgctctggtgtttgagcccgccaatgtgactgtgtctgccggcgaggagatcacctgggtgaacaacgctggcttccctcacaacatcattttcgacgaggatgaggtcccgtctggtgttgatgccgatgccatctccaatgaggacacctttaacgcccccggc

SEQ ID NO: 3279 - DNA, 488 bp, Chlorella vulgaris
  unsure (1)..(488): unsure at all n locations
gtaacggtccgaagttcncgggtccacccacgcgtccgcaaggtcaaggagatcaagaacggccgcctggctatgttctccatgttcggcttcttcatccaggcacttgtgaccggcaagtctcccctggagaacctggccgaccacctggctgaccccgcctccaacaacggcttctccatcctgaccgccaccaagttcaccccctgaattcagccctgaattttgagggaaatcccctggctgctgctagttcctcgttgttctagctcttggttggttgccggtgtgtcgctgttgtgtgaaggggagaggcgtgaccccttggttgtctactggcagcagcagcagcacccagcagctggacggtcgtattgagatgtgtgtgacgcggcaaaattcgtaacgcacgaggaaccgagaagagcacctttaattccccctgctggttggagttttgctgcatttgcactgtacactggcgggct

SEQ ID NO: 3280 - DNA, 365 bp, Chlorella vulgaris
ccggggccacccacacgtccgcaagatggcgcggggcccaaacaaacatctgaagagattgattgccccgaagcactggatgctcgacaagcttgggggcatctttgcccccaagccgagcgcgggcccccactagacccgggagtgcttgccgctcatcctgctgctgaggaacaggctcaagtacgctctgacgggcaaggaggtgacgagcatcctcatgcaacgcctggtataggttgaccgcaaggtgcgcactgacaagacctaccccgtgggcttcatggacgtggtcaccatccccaagaccgacgagcacttccgcctggtctacgactgcaaaggccgctttgtggtgcaccgca

SEQ ID NO: 3281 - DNA, 415 bp, Chlorella vulgaris
ctcccgggtcgaccgacgagtcctcaacatagccctgggcccaaacatacatctgaacacattgaatgccctcaaccactggatgctcgacaagcttgggggcatctttgcccacaggctgaacgcgggtccccaatagattcgggaatgcttgccgaacaacctgtggctgagaagaacgctcacctacgctctgaccaggtgggaggtgacaaacatcctcgatgcaacgctctggtatatgttgacagcactgatgtcactgactggaacttgcccgtgggctacagtgacatcatcagtatcgtcatgatcgacaaccacttcagcatggtcaaagattgcaagggcctctttgtggtggacggtatcatttacgcttacgccgtgtacaagctattcatagtccgccacg

SEQ ID NO: 3282 - DNA, 404 bp, Chlorella vulgaris
ccacgcgtccgcagacgcgtgggcggacgcgtgggcggacgcgtgggcggacgcgtgggctcggagcttcgacgagcgtttatttcgtgagagtcctacgtggcaacctgtcaactgttgtctacagagctgaaagcctgagaacatgtacatactaagatatgttgtgaaataccactgctcatgtgctgacactgcctaaccgccatgcctgggtcttgtcctgtagtctagcctgactagactcaccaagcatgcatgaaagaatcgtatataaaacagtggttagctcgtacatgcccctttactactttttacccttttccccttcagccgccttttttgcaagcttctcctggagtgccttcgcgtccctgcacatgtaagatggcaagtgtcaaaaa

SEQ ID NO: 3283 - DNA, 448 bp, Chlorella vulgaris
gggtccacccacgcgtccgcatgacaatgaggagctggggaagggggaataagttaccacccctggttaacttaagttgtttatagcattgtgcttggcttgtcactggctggcacacagtcagcggtattttcacctggctgccctttctcatcgaactaaaacctccagggtgttgtacggtattgaaatcactgcaagcttggtttcaggacggtaacgggtgtatgacgtgggtgtccacattgggtgctctcaagataggttcagaccagcttgcaatttaggcacttcactgctgcttgccttaggaagacgcgcaaggtagcgttgaactcgttctgtcgactgccaacaaatatcttttttttatcgaattccagaattatctcctcccagcaaatacagggcataatcccaaggggataactggtaacattgtcctggg

SEQ ID NO: 3284 - DNA, 403 bp, Chlorella vulgaris
gaattcccggctcgacccacgcgtacggcgccgcctgcaggatttccaagatcaactggaaggttggcaaggagactggtggcaagaagctggaggagccccacgggctcaaggccaacgagatggccgaggttgtgtttgagccctgccagccgctggtggtggacagcttcaagaactgcgagggcctgtcccgcattgccttcctgaacggcaacaccgccgtcatgcttggcaaggtggtggccacctccgccaagtgacgccgccggcagtgggcacgggcgctgtttggcagcctccccacccccccttgctggacgcaggctccgatggccggccttggcctgagcccatcctccccgctagtgcacactggttggtgccttcgaaggaccgggtg

SEQ ID NO: 3285 - DNA, 429 bp, Chlorella vulgaris
gggtccacccacgcgtccggacgtcgcctcatgatgcagtctggcggcgagaggcagtacaatggcaccattgactgctggcgcaaggtggcccagcaggagggcatgaaggcgttcttcaagggtgcctggtccaacgtgctgcgcggcgccggcggtgctttcgtgctggtgctgtatgatgagatcaagaagttcatcaaccccaacgccgtgtcctctgcctccgagtaagcagccagcggtggtgctgcggctgggcttccacgtgtctgcggctgcgcgcgtttgatacttgcgacccgccttggcagtgaagctaagccctacatttggcagcgaatcagataatggctccgtacgagcatgcgctgttacatagggtcgccgcacagggtttcagaattggggcttggccctggccccttg

SEQ ID NO: 3286 - DNA, 335 bp, Chlorella vulgaris
cgggtccacccacacgtccggatcagtgccgtacgtactgtctggtggcatgtgtgcaaactgggagctgccaaggccagattctgggtcaaaggacggttctagagtgctgagagtgtcatcagtttgcgtaaaccttggttgcatgtgtgagaagcgcacacagcagccaacatgccgcccttgcgtcatctgcctggcttgtgcagcacggttggaactgctctgtcgtcagcttacagaggaatgttgaggtatcatttccttgccttgagcgaggcaacctcaattttgcggtgcaagtccgctactttcatctgcgcctcttgcaacga

SEQ ID NO: 3287 - DNA, 359 bp, Chlorella vulgaris
ccacgcgtccggacggtgggaagggcttgtcttccgcaagccaaaatgccgtccataggcttttaccgcaactatggcaagaccttcaagaagccccggcgccccttcgagaaggagcggctggatgccgagctgaagaccgtgggcgagtacggcctgcgcaacaagcgcgagctctggcgtgtgcagatggtgctgtccaagctgcgctccagggcccggtccctgctgaccctggacgagaaggaccccaagcgcctttttgagggtgaggccctcatgcgccgcatgtaccgctacggcttcctggacgagacccagaacaagctcgattacgtgctggcgctcaaccctaccga

SEQ ID NO: 3288 - DNA, 173 bp, Chlorella vulgaris
tttttcacatgccttgctgttacacacgcttgttcagaaggtcctggcccaaacgctcagccgccgacaatgacccaggttgacctacaggcctggcatggaggctgcctcattgatgcagctccccagagacgaatcttggagaacactcacctgttcttgccgctcttgaa

SEQ ID NO: 3289 - DNA, 278 bp, Chlorella vulgaris
aacccacacgtacggcctgtctcaattttgttgtaccagcaacgctactatggttggtcggcatgggcgcgcggagctcgctatttatggtcaccatgggcgcaggcatcagaattggggtgtccttcccattcggaggtgaccaagtcccacccgtgggagtgctgtcaagtttcccatgtcaaagctgtcctccccatcaacggcagccgctctacaggatcccagcttagctacacgtggatggccacgtcctacgctcttctaaacttgtcacc

SEQ ID NO: 3290 - DNA, 109 bp, Chlorella vulgaris
cgacccacgcatcaaggcctgtctcaagttttgttgtaacatgtcaaggctactaggtgttggtactgcatgcttcgctgctggagctcgcatatttatcggtcatcca

SEQ ID NO: 3291 - DNA, 333 bp, Chlorella vulgaris
cagcagctgacgtccttacactagaccagcggcgtcaatacgctcaagcgttaaaggttcgactgatggggtagttcctgcactgtcagatcggtgcgcctttggcttgccacctagtcaacatccatgatgccactggcacgagtgggagttaccaacggttagctttggactgcaatagtgtgactgccggcagcgagctttttgtcaacagcgcttggcagaaaccttcctggcaggggggccggcggtagacctcattgcttgccacctggctgtgcgctttggagaccccttcgtttcaagcatgtacaaccattaactgtctaggcc

SEQ ID NO: 3292 - DNA, 427 bp, Chlorella vulgaris
  unsure (1)..(427): unsure at all n locations
cacccacgcgtccggacatgggcaccctggaggctatgactaagggcagcgaggctcggtaccacagtgacacacagtcgctgaagattgcgcagggcgtggcggggaccgtccgcgataagggctctgtcaagcgcaatgtgccgtacctcatacaggccgccaagcagggcttccaggacctgggcgccaggtcactttcggaggcgcacgccatgctggccagcgggcagatgccgctggagtgccgaaccggcgcagcgcagcgggagggccgcgtgcatgacttgcactcgtatgagaagaactcctggtgattatgtcttgcagtcatgattatggggttgctgtggggttgtgtcgctggccgcctctaaatttcanaaggtccccggcgctgtgctgtgctttgtgaaggcactgcatt

SEQ ID NO: 3293 - DNA, 313 bp, Chlorella vulgaris
gtaccggtcaggaattcacgggccgacccacgcgtcaacccacgcgtccgtccatgcgtacgcatacgcctccgttaataggcttcgtttttggttaccacatgaatcgtaggggctgggactatgccgctcatatgcagaattttgtagcccagtcgggaggaggttgacaccctagtgtgctggcagaatacagagggtatacgggcaactttggtctgggggataaccaaccgttgcctgacgaaggccaccaaaataggcctcatttcacatgttactgtgaccggcacaggttcaactaataatcttc

SEQ ID NO: 3294 - DNA, 326 bp, Chlorella vulgaris
tcacgggtcgacgcacgcgtccgatgcgaattctcaccacggtaggcaaggcatcatgctgctaccacggctgataagcgagcgcgcgcacttgaggggggtggtcacatgtgcctgaagcgcggcaccccgacgtcattgggatccttttggctgtgatagggagtgcaatgcctggccgggaagggtcaaatcttgttgcaagttgggcgcgtgggtgtctaagaatcactgcaaatgagtgacacgaccctgtaacgattaagtgacaaaaatcaataaaagggtacgtgctggtgatcacagcacgtacaaagacgacgcac

SEQ ID NO: 3295 - DNA, 381 bp, Chlorella vulgaris
ggtcaggaattaccgggccgagccacgcgtcagggggcgagtacgtttatgaggatgggtcgccacactgtgtcaactatttccgcttatttcaaccggttccatgtggactagaaccatacggcccatagcaagatttgttactaactcgggcggaggctggacagccaattgtgctggaggtctacaacgcgtaaatagacgcctttggtgtgcttcacaaccactgatttcatgtgggagctcacagaaacaacgctctcttcagatatcctcgtcaccgcaacatattcacataatctgcttcacaatgctataaatgcctgccagtggaactataccactttggactgcacgtgccgtctgccgtcctgccaaatg

SEQ ID NO: 3296 - DNA, 391 bp, Chlorella vulgaris
ggtcaggaattaccgggtcgacgcacgcgtccgcccacgcgtccgcccacgcgtccgcactatttagattggcgaccagggcagaacctcctactgtgctgctccgatcagtccatcatgctgtccatgacgcaacggtccttctccttcgacggcattccggttatcgtaggatgcagacagtccccggatgaactatccagaacgagggctttgtacagcccaagcagccgcctaacgacagcagggttgatgacagttcctgttccagcaccccaaaaccggaggtcgtccacacgagcaccgccacaggggacttgatagggcttgacctctggcctgcctctgtggccctctgtcgctacctggcagcacacccacagatagtgtt

SEQ ID NO: 3297 - DNA, 410 bp, Chlorella vulgaris
cccacgcgtccgaaggcagtgcatctgctgaggaccgaaacggacaaccatgcagattttctgcaaaacagacaggactcatgtccttgagcttagctccgaggccactgtggccgatgtcaaggctgccatcgaggccagccagggcatcccctgcgatgcgcagcgtgtgatgttctctggtcgccagctggaggaggaggcctccctggccgcctgcggcgtgtctgacgacagccagctgtacatcctgatgcgcctgctgggtggtgccaagaagcgcaagaagaagacctacaccaagcccaagaagcagaagcacaagcacaagaagattaagctcagggtgctcaagttctacaaggtagacgacagcggcaaggtgcagcgcctgcgcaaggtttgccccc

SEQ ID NO: 3298 - DNA, 123 bp, Chlorella vulgaris
accacgcatccgcccacgcgtccgcccacgcgtccgaaaaaaaaaaaaaaaaaaaaaaaaaaaaaaaaaaaaaaaaaaaaaaaaaaaaaaaacaaaaaaacaaaaacaaaaaaaaacccaaaa

SEQ ID NO: 3299 - DNA, 424 bp, Chlorella vulgaris
  unsure (1)..(424): unsure at all n locations
gtccgcacacgcatccgctatgtanggatgccaggcgccgggtgttgccatccttgatccgatccttgcctctcacaccatgcgtcgccaggtggcagccaaagctgcccagcttctcaaggctgcctcgcttcccttgggacgcgctgctgccaaagctgctggaaaggtctatgtgcctgcagcagcaggcgtctcagcagctgctgcagcccaggcaaccacagccctgcagcagccactactagcacagcgtggcctagccagcctggcggcaaaagcctccagaagtgctggtgcagtgcgagcagcctgtcagccagcaagcacagcgggcagcacaactggccagctgggtgcagccctccaacgagcagctgcagggcaggcanggcagcaggcacgtgggctgcgctacctgggc

SEQ ID NO: 3300 - DNA, 452 bp, Chlorella vulgaris
attcacgggtcgacgcacgcgtccgagcggcagggggcggggcgcgtttcaattttggcgcctcccagatgtttgcctactgcagcactgcggggtgtcggcacagggccatggctgggctgccctcttgtacttggccagttctccttgcgattgggaatgaggtaacagagcattaggttgcatgaagggccaaggacttggctgcttgaatgtgggagtgaaagggcaaccgtagcccatggcttgccactgtggcacatggcttgccactccacggggccggcaagaagcactctgaggcctggtggaaggtaaaccattagcatgggtggcaggcagtgcaaacagggaggagctgggctggatccagcccagactgtccactgtccagagagtccggactgacagggctggatgcagaatgagcctgaatactattgttgcaactc

SEQ ID NO: 3301 - DNA, 323 bp, Chlorella vulgaris
gacccacgcgtcagccgatgcgtcggcggatggttgggaagggaagctgcggatgcgctcgaggcagtggagatcgcaaaagtaggcacctgacatttgagcagggcgcgctgcgcgcgctcatgcaactgagagtctgtcactgcaagttcatgctagctatcttgtacgggtaccctttccatctcgatgtccagcgggaggatttaacacaggcgatgcgtaaggcagcggtgggtacgtggttctacatttcgaggggtcacggatcgtcaaggtgaagtggcagggaatttatgctcgtcacctaacgctgcagtgcc

SEQ ID NO: 3302 - DNA, 441 bp, Chlorella vulgaris
  unsure (1)..(441): unsure at all n locations
attcacgggtcgacgacgcgtccgacgcacagctttaggtctccaaaggtttctgcctgaaggtagtaagctaaggtaagcggtggcggactgcaaaacctgcatgatgattgctgcgctgtttgcatgcgataactaggggaccatcttttctcccagcatgttttgcctaataaacagctgtcactgcccgtcaatgacgacattgcctccctgtggggcgcagtctgtcctcctatactcatttctaggtgttgttgggcaggcattcgtatttggttgcaatcaaaccgttgaatatctttccagtcctttctgcggctgtactgcagctttgagttggtgctttttagcatgctggaaactcctataatgttatcggcgttgagctgccccttcaagctgtgctgcgaaatgtctgacgctgcanaaccttcagca

SEQ ID NO: 3303 - DNA, 405 bp, Chlorella vulgaris
gtcgaccgacgcgtccgcagaaacctaagccaccatggttgagcaagaagacagtcaatgccgcaatcaaggagggtggcaagaacggcgtggacctatgcggtacctgcgacatgggcggcgtgtccttcttcaaccttgccatcgagtctgccgatggcgagtttgagctcctggacaaggtgctggacggagccaacgcccctgttgacgaggccgctgaggagcgcaagggcggcgccgctaacatcggcaagttcttcttctctgctggtgaccaccagctggctgccctgtgccacctgcccaaggccctggctgagtccaagagcgtgaagaagcaggactgggtggatgccgtgctcaaggtcctacccggcgcagagattgttgaggagaccgagg

SEQ ID NO: 3304 - DNA, 381 bp, Chlorella vulgaris
taactctcaccgacacagcaatcttccagcagccgttggccaccggaggcccttcgcatttgcagcatgacagctaggccgaacgccctcggccttaccacctagggcatggcaggtgccgtcattggcgccatcagggccaacaacagcatcacattcgactgccatcctgtgctgtacactggtcgccagctggacgatgacatctcccctgacgcctgcgacgtgtctgtcaatgtccacatggacttcctgatgctccagctggatagtgccacgttccacatcgcgatcaccttacacaccctcaacaagcagaaccacaaccacatgattactaagctcagggtgctcaggttctacaaggtataccacagcggc

SEQ ID NO: 3305 - DNA, 442 bp, Chlorella vulgaris
attcacgggtcgacgcacgcgtccgctctgcatatactcgtcttcgtcacaagtaaaacatgcagaccgccatgtcccagagggcttttgtcgccgcacagcccgtgcgcgctgcccccaaggccacccgcgcagccaggtgcgctgtggtgctgcgcgcctccgctgaggagtctcgccgcgcagtgctgggcggcctgctggccggtgctgtggccctgaccgcgggcgccgccaacgccgccaacgacattatcgatgaccgcaaggccatcgagaagggcttcaactggacgtatgaggcacgcgacaccgacctgccccagaacgtgcgtgacggtctgacccaggcacgcgccgaccttgagggcctcaagaagcgcattgccgtcagcgagaagaagatcgacacggagctggagtcctacatcaagaagaacta

SEQ ID NO: 3306 - DNA, 447 bp, Chlorella vulgaris
attcacgggtcgaccgacgcgtccgaggacgcatgggcggacgcgtgggcggacgcgtgggttagaaatagataaaccagggctcgagggttagctgattaataagcagcaaacgccctcgtcttcgttgcgttgaccaagaggagatggctgacacaggcctgcgcgtggttggcttggctgttaagaaggagaagtggcacaagcacatcagtcaaaccctgctggacaaagccagggaagcgggcttcatactgaagcaactagaccagggcgtgcctttggaggaacagggacgcttggacgccctgctgcagaagctacgcgagccagagtgggaagagcagttggagcggtatgctgaagcccaccctgaggtcaaggtgtttgaccggccagccgctacgctgcctatccgcaaccgtggcacaatgctcactatgctgg

SEQ ID NO: 3307 - DNA, 309 bp, Chlorella vulgaris
gtgaccacgacattacacagtaaagggaccaaagccagcttgctcgcgccccatgcctacacttccacccaaggcttcttgatatctcataagaacaactcaacctgtccacttccaaaatcctacaatgataaagccgggattgccggcatgtttacgcaagaatagtatgagttcaggttcaaaggggcgtggcctcatggattgatgccagatgttcaagactagtcggcttataaaatagtacgcacaaaatttgcgggctacgccgctgcgattccccagtgggctggcagcgctacacaccca

SEQ ID NO: 3308 - DNA, 460 bp, Chlorella vulgaris
  unsure (1)..(460): unsure at all n locations
attcacgggtcgnaccacgcgtccgaatagttccaggggaatcactatgcagggaaccatgatgaagaccttcggggccagcctgcgcaagggtgttcccaaccaagggaagggcaaccgccaggtgtaccgcccctccgtggagtggtacggccctgaaaaggccaagttcctgggccccttctctgagggctccacccccagctacctgaagggcgagttcgccggcgactacggctgggacactgctggtctgtctgccgattcccaaaccttcgctgcctaccgcgaggttgaggtcatccatgcccgctgggccatgcttggcgccctgggctgcctgacccccgagctgctgcagaacgccggcgtggccagcttcggcgacgctgctgtgtggttcaaggctggtgcctccatcttcggcgatgatggcctgaactacctgngcaacccctcc

SEQ ID NO: 3309 - DNA, 73 bp, Chlorella vulgaris
ggtcaggaattcacgggccgacccacgcgtcagaaaaaaataaaaaagaaaaacaaaaatgaagaggaaaatg

SEQ ID NO: 3310 - DNA, 456 bp, Chlorella vulgaris
gtcgaccgacgcgtccgcccacgcatccggtgatccatgcccggtgggccatgcttggcgcccttggctgcgtcgtgcccgagctgctggaccgcaacggcaccgtcaactttggcgagaacgccgtgtggttcaaggccggtgccgccatcttcggcgatgacgggctgaactacctgggcaacccctccctcatccacgcacagtccatcgtggccgtgctgctctcccagattgtgctcatgggcctggttgagggctaccgcgtgaacggcggccccgctggcgagggccttgacgccctgtaccccggcgaggcctttgaccccctgggcctggccgacgaccccgacagcttcgctgagctcaaggtcaaggagatcaagaacggccgcctggccatggtgtccatgcttggctttggcgtgcaaggcctgctcaccggcaagggccccc

SEQ ID NO: 3311 - DNA, 352 bp, Chlorella vulgaris
cgacgtgttacactgcaaagcaagccacgcgcggacgctcgcactgctgctgctgctgcaacaagtcaggcctacccgctgcaaaggctcggcggctgcacgttgctcaaagcttgagagatggaaaatgcatgcgcggaagacagacactcggccgaccaacggtctctcactaaaacccagctcctcagaatatgtgtgcgccctagtaccggctcccagccaatttgaacaccaatcaatgcgtgccgtatgaactgccaagtgcctctgtacagccatgaaaagcataaacagcgtcgcagggtgcgcaagggaacgggccgccccctcaaccaacctggtccctcac

SEQ ID NO: 3312 - DNA, 417 bp, Chlorella vulgaris
ccgggtcgacccaaacgtccaataaggtgcaacgcacctgcagcagacaggcctgctttctatttcagctgggcttcgactgaggttggaaacccagatggcaacaaggggtggcctgtccaggctgtttgagcccgcctaagcctggatggcaacccgctaccaggcggctctgagcaagcaacttgtcaaatatggccttagatacgaggacctgtatgacccacagcaggacctggatgtggactaggctctgaagcggctgccccaggaggttgtggacgcgcgcaaccagcggctcaagcgcgcctccgacatctccatgaagcactcggagctgccataggagatgcagaagctgcagacgccctttgagcactacatgaaggatgccttggatcaggtgcccctggagaa

SEQ ID NO: 3313 - DNA, 435 bp, Chlorella vulgaris
attcacgggtcgaccgacgcgtccgggaggcatcttcgagccctgcctggctatcccacttaggacaagatgccgcctaagcgtaggagctctcaggaggagaatgtcaccctgggccctgccaccagggagggtgagctggtgtggggtgtgtgccacatcttcgcgtccttcaatgacacctttgtgcacgtgactgacctgtccggcaaggagaccctggtgcgcgtgactggcggcatgaaggtcaaggccgaccgtgacgagtcctccccctacgctgccatgcttgccgcccaggacgtggccgctcgctgcaaggagctgggtgtgaacgctctgcacatcaagctgcgcgccactggcggcaaccgcaccaagacccccggcccaggcgcccagtccgccctgcgtgcgctggcccgctctggcctc

SEQ ID NO: 3314 - DNA, 339 bp, Chlorella vulgaris
cagctttgtataggagaggcatgtaggtttgaacatctgcattgactgcacttggtcgccagcttttgacaccatgacggtctctgccatattacatctgcaatgatctccgcctctcaactggcggactacgttggtatcgtcttgtactcttccttctgctttggctgggtggtggcttgcagccatgtgtagctgttgttgcgccatgcatggttcggttgccaagcaaggttacctcttgcagttacagaagcaggagctggctgtctgttgtaagagccaaggctaaaaaaaaaaaaaaaaaaataaaaaaaaaaaaaaaaaaaaaaaataaaa

SEQ ID NO: 3315 - DNA, 439 bp, Chlorella vulgaris
attcacgggtcgacgcacgcgtccgagatgggctaccccggcggcatcttcgaccccctgggcttcagcaagggcgacttcaagcagatgaaggagaaggagatcaagaacgcccgcctcgccatggtcgcctttgtgggctttgtcatccaggcgcaggccaccggcaaggggcccctggccaacattgccgaccacgtgtccaaccccttcgcccagaacatcaccaagaacattggcaactgcatgatccccgagtccgtcgacatccagggcctcacactgccgctcttctgcctgtggcccggctcccactgagtgcctagtatgtactgccgctggggagcagtaccattacctggtgggaccgccctgctgcagctcctccgttcattttactaacgagaagaatacaaacacgtttccaagccgctgctca

SEQ ID NO: 3316 - DNA, 409 bp, Chlorella vulgaris
attcacgggtcgacgcacgcgtccgaccacgcgtccggtggaatcccccgtcgacaacaggtccaaggttcacaagatgcagaccctctctgcccgtttcggcgtccgcgcccctgtctcccggggcacccgccaggtgacccgcgcctccgtggagtggtacggccccgaccgcgccaagttcctgggccccttcaccaaccccccttcctacctgaagggtgagttcgctggcgactacggctgggacacctctggcctgtccgccgatcccgagaccttctcccgctacagggaggttgaggtgatccatgcccggtgggccatgcttggcgcccttggctgcgtcgtgcccgagctgctggaccgcaacggcaccgtcaactttggcgagaacgccgtgtggttc

SEQ ID NO: 3317 - DNA, 403 bp, Chlorella vulgaris
ttcccgggtcgacccacacgtccgaccacgcgtccgatgcaggcaaccatgatgaagaccttcggcgccagcctgcgcaaggctgtgcccacccagggcaagggcacccgccaggtgacccgcgcctccgtggagtggtacggccctgacagggccaagttcctgggccccttctctgagggctccacccccagctacctgaagggcgagttcgccggcgactacggctgggacactgctggtctgtctgccgatccccaaaccttcgctgcctaacgcgaggttgaggtcatccatgcccgctgggccatgcttggcgccctgggctgcctgacccacgatctgctgcagaacgcaggcgtggccagcttctgcgaccctgctgtgtggttcaaggccggtg

SEQ ID NO: 3318 - DNA, 91 bp, Chlorella vulgaris
cccgggtcgacccacacgtccgaatacccgtctggtcatacttcgcgtgcagtcacgatgtgagcacttcttgctcatcgcatcggagctc

SEQ ID NO: 3319 - DNA, 407 bp, Chlorella vulgaris
tcccgggtcgacccacgacgtccgacgtcgacaacaggtccaaggttcacaagatgcagaccctctctgcccgtttcggcgtccgcgcccctgtctcccggggcacccgccaggtgacccgcacctccgtggagtggtacggctccgaccgcgccaagttcctgggccccttcaccaaccccccttcctacctgaagggtgagttcgctggcgactacggctgggacacctctggcctgtccgccgatcccgagacattctcacgctacagggaggttgaggtgatccatgcccggtgggccatgctatggacccttggttgcgtcgtgcccgatctgctggacctcaccggcaccgtcaactttggagactaagctgtgtggttcaaggtctgtgccgcgatcttc

SEQ ID NO: 3320 - DNA, 240 bp, Chlorella vulgaris
aaaaaaaacaaaagggcggccgggctgacaggactaaaggttacgtacgcatgtatgcgtggtcatcacgcatcaactctgtcaccgaggttcatttcattggctgatcggtttatcacttcaagactgggaaaatgctaaagttatccagtttacctcgcctatgcacatttcaccatttcgccatttggcgatctagcgtagaggccagcagggatcgccctttcgaacatttgaaca

SEQ ID NO: 3321 - DNA, 344 bp, Chlorella vulgaris
attcacgggtcgacgcacgcgtccgaccatgcgtccgctcacgggtcagatccccgtctcgcaatacttcgacggcatgcaggatgcacgcaacgatgataaacacgatctgcgtcagcctgctcacggctgtgccaatgcagggcaagggaacacgctatctaacatgaacgtccttcgaatgtcaatgccctgagtggtcaaagttcctaagcacattatctgaaggatccacacgcaggaagttgaagggaaaatttacctgccactacagctgcgactctgcaagactctctccatactcacggcgcttaccagccataagagaagtttaggtcatcaaa

SEQ ID NO: 3322 - DNA, 206 bp, Chlorella vulgaris
ccgggtcgacccacaagtccgcccacactgcggtttggacttcttgcaaggtcataggacatatgtctcagaatagccagaccaatgcatgggcatggcacccactaaacatgatcagcagcccgctgcacaggtcctgcagccccttcagccatcagcatcaatatcacaggctttggctcactggccgcctccaccctatatca

SEQ ID NO: 3323 - DNA, 423 bp, Chlorella vulgaris
tagagagccgctgctggataaaccacccttgcgttcttgtcaaccccgcaagaggcgtgcgacgggcaaacgcttgcagaagctgcctagggacccttgcgatctcgactgtgcgacataagttcgtcctggttatgtggatccagtcagggagtgccaggcccctcagtcgtcagcctgaacaaaacaggaggggcggcagctggtcacaccctgccgccagctgttgcttgtagctgggtgatctggaggagggcccgccggaaacagcagcaagccagtggatcgcattgcagattctggagggctggcatggggcgggcagcctccatagagtgtcgcacagccgatagtggcggtggcgaccgaggcgatggctgcatcggacgcagaagggggcctgacggtggtggcagtggtggt

SEQ ID NO: 3324 - DNA, 310 bp, Chlorella vulgaris
ggtaaaggtcctagaatcccgggtcgacccacacgtccgacaacccttcggccaatccttcggccaagcctccggggggtttccccgaacaaaaccctggcggcggggtttttccacctggatggagcttgaacttggggtttaaaaggcgggaattttctgccaaggagccaaaggatcccggcaagaatttggtgaacttgcattcttgttaacaaatttttgcagaatccgacaaaacttgcccgccctgggtgacaaaatttttaagaaatcaagttaattaaagaatccgttttcaaaaatcccc

SEQ ID NO: 3325 - DNA, 442 bp, Chlorella vulgaris
gggtcgacccaagcgtccgaaagaacccttcatgttaccctctggaactgcatttaaatgttgcctcttcttggtcgctaaccatcgctcatagctggagctgagatggacatgatccgctctgctctgcagcatctgcacaccccagctgttgtggctgaaggtgttacgacacggtatctggacctgctaaggagctcttttaagatatgcgagacactcaggttgtcttcagcaagtgcccacagtgaaatgcccgacccaggccctgcttctgctgggcctcgggttgccatcatgtctgagccgggtgctgggtatgtagccagcacttggggcacttggctgcacaaggggatcgctgtacccttgtgcctgtcgcacccagacaggtccttgcaatatgtgctggcagatgctggagtgacatccatgctagcct

SEQ ID NO: 3326 - DNA, 250 bp, Chlorella vulgaris
ttttttttttttttttttttttttttttttttttatttttttgttctttttttttttttttttttttttttttgaccggggggtccccgggggcgcctttcaagggcaaaaaggaaaaaccccgtaaatgaacaagtggaggccggaaaaaccctggccccgtggaggaaacgcccgtaccaaagtgggtccctgggcaaaaagccgtcccccccaaaatttccccgggtggaaatgtaacacaattccc

SEQ ID NO: 3327 - DNA, 116 bp, Chlorella vulgaris
ctcttcaattcatataataatatgaccggggtgaccccgacggcgcctttcaaaggcaaaaaggaaaaaccccggaaatgaaaaagtggaggccgaaaaaaccacggccacgagga

SEQ ID NO: 3328 - DNA, 408 bp, Chlorella vulgaris
cccgggtcgacccacacgtccgacttactaaagatcgcagccatgggtggggagcgcgtcaggttgtacgtgagtggcaatatcctcggatacaagaggggcaagtccaaccagaccaaccacacctccctgatcaagatcagcggcgtcaactcaaaggctgagaccgaattctaccttggcaagaagattgccttcatctacaaggccaagaccgagaagaagggcagcctttatcgcgtgatctggggcaaggtcacccgtgcccacggcagcaccggcactgtccgcgccaagttcaggaagaacctgccacccagctccctgggcgccaaggttcgcgtcatgctctaccccagccgtatctagtggactgaagcggcgccgccagctggcgggcagcatgca

SEQ ID NO: 3329 - DNA, 422 bp, Chlorella vulgaris
ccgggtcgacccacgcatccgacatgctggggcgctggtgctgctcgtagcaaggcaaaggcgctgttgaatgaatgtctcgcttgctcgctctcttgctcggaggcattgctagtgagggaccagggtgggtgagggggcggcccgttcccttgcgcaccctgcgacgctgtttatgcttttcatggctgtacagaggcacttggcagttcctacggcacgcattgattggtgttcaaattggctgggagccggtactagggcgcacacatattctgaggagctgggttttagtgagagaccgttggtcggccgagtgtctgtcttccgcgcatgcattttccatctctcaagctttgagcaacgtgcagccgccgagcctttgcagcgggtaggcctgacttgttgcagcagcagcagca

SEQ ID NO: 3330 - DNA, 384 bp, Chlorella vulgaris
ccgggtcgacccacaagtccgctctaagctgcttggccctgatcgacgtgcattatattgcatttgcatatatagcgtagggacagggaatcgcagatgtagtcagaaagaagcctaggttagggaatcctgcagtcttgtattaatgtggtagaagagcttattgcggagtacgctaccagtgaccttcgtctgagtaggcatcttctgttgggtactcctaccctgttgcagcttcgcaagtgtattggatcagttctagcggtatttgcaagcatgcttgcccggcgagtttgttttagcctgaatatgacttgtgaagcgtgtatgatggaaaaaaaaaaaaaaaaaaaaaaaaaaaaaaaaaaaaaaaaaaaaaacaaa

SEQ ID NO: 3331 - DNA, 414 bp, Chlorella vulgaris
cccacgagtccgaaccggcgctccctgcaggtctgagcgcaatgccaagtacaaccagctgatccgcattgaggaggagctgggagccgatgctgtctttgctggcgagaactggcgccacattgcctactgagcagacgctgtgcatctcgcttctgaagtctcgcgcttggtcagcctgctgcccgggttgttgggaccagggcccaattgatgctgatgctgctgatggtgttggtgttggttggcggggctcacagcgaagaccctggaacattgcatgcttttccgacaggtcccgccaggggacacgtggcattgcttgtgagtgctggcgcgcgcgtggcaggacagtggaactgttttttgcggggtggcgggtaccgtactgccggggtgtggatgttgtaccta

SEQ ID NO: 3332 - DNA, 401 bp, Chlorella vulgaris
cgggtcgacccacgagtccgggatccggcaaggaagcaagatgccgatccagggcgggcacaagtaccaccagtatcaggtggtgggacgccaccttcccacggagagggagccggagcctaccgtgtaccgcatgaagctctgggccagcgaccctgtcagggccaagagcaagttctggtacttcctgaggaagctgcgccgggtcaagaaggccaatggccagatcctggcatgcaacgagatctttgagaagcaccctaccacggtgaagaactacggcatctgggtgcggtaccagtcgcggactgggtaccacaatgcgtacaaggagtaccgcgacaccaccctcaacggcgccgtgtcgcagctgtatcaggagatggcctcccgccaccggg

SEQ ID NO: 3333 - DNA, 408 bp, Chlorella vulgaris
ccgggtcgacccacgagtccgaatgtctttgcgtaggaattggacgttggtgcttgctttgtagtccgctacagtgtcaccaagtttttctgttcctgtgtgaggttcaaggtctgttaggtttcaatttttttgctactgaagggcttgccgtctggcagccatcctctgtgccagttcaaagtgaggattgtttccttgggtagtctcagggttttctcgagaccccaacaactggctgggtatccaggcctggcaggtgccagtggttgtgtgatggtgggtttgtggcgtggactgggtggcagtgggcttgatcagtggtggttccttgtaggctcggagataggggcttgctcagtgaggcaagcaaaaaatatcgcggaatggttggatatgagcatgtgc

SEQ ID NO: 3334 - DNA, 422 bp, Chlorella vulgaris
cgggtcgacccacgagtccgactagagcaccagctggagagcagcaacgtggagggaatggcgtttggggacgagatgaaagagaaggggcccgaccatgagaaaggggaggactacgaagacattgagcaccagatgaaccccgcttccctccagcctagggagccggcagtcaccaagtcaaaggaggtgcctcgcacaccctcagagaaaatctttgaggagggcaccgcttgagtggtcaataagggcattcaatacgtacggagaatggcaagtcgtacgtcaatgttgagggcaggaccgggtagtgttcgtccagcatgtagtctggcggggagacaagttggtaaggcaggtcttgtgctgagtgccgaggtagagtatacgaagcctagccttgtcatgcagctaacctggcc

SEQ ID NO: 3335 - DNA, 416 bp, Chlorella vulgaris
tcccgggtcgacccacacatccaataggagcagagtcgtgtttcgctgtcatacagtagtccccatgaggtttggtgttgaaaatagttagtatgggtggcaggtagtgcgaacagggagtgacagtttatatgtaccgacagggctggatgcacaatgcgcctgagtcttgctactttgtcgtgacggacagtacgtcgtgggtagggcagtggagcctcattttgacttgcctgattcagggtttacaggcatgctaaccatttttctttccagagtcatactgatctgacatggctcgatgacgatgtgtggttgttcagtctatgcgctgacccggccttgcttgaccgtaggcagtttgtaatgttgcactgaagcagggacgggtagattgtgctgccctacgatgccct

SEQ ID NO: 3336 - DNA, 240 bp, Chlorella vulgaris
ggcttgcggtgcgttaatgctgctaacttgttacggaaacaacagtacctcggaagaaatcacacgcaaaagggaaaacaccggagcttacacacacatgacgtaccaaacatgacaagggccaatttgttcctcccaggggtgattccaaacctgctaaacggcccaggcctgaccagcaactccctgcccctgcaggccaaacactggcacttcccaagcacaaccaaacgcatcccc

SEQ ID NO: 3337 - DNA, 415 bp, Chlorella vulgaris
cgcgtccgaccacgagtccggcggtcgaaagtcggttgtgtgcgtgctgctttagctgctgaggtccaggcgtgtggtcgaaagactgcagccgcaaacagggtccagcttggctcctctgacctcctcgtcagtgagtgctgcctggggacgatgacctgggggcagcagaataccgaggcggaggcccatcagcagctctcctacgcggtcgacgactgtggcatcaacttccttgacacagcggagatgtaccccgtgcccaccaagcaggagacgcagggcaagacggagcgctacattggcagctggctcaagggcacgcggcggcaggacatccttgtggccaccaaggtgtcggggtatgggcggcaggactacctgcgggagaacaaagcctttccccgggtgactc

SEQ ID NO: 3338 - DNA, 418 bp, Chlorella vulgaris
cgcacgcgtccgattgccttggctcttcgttcatcgggtgggccggtcaaaaatggcggatcacgacgacgagcacgatgttcacttcgagtctgccgatgccggcgcctcaaagacctatccccagcaggctggtaccatccgcaagaacgcatacatcgtgattaacaaccgtccctgcaaggttgctgacgtgtccacctccaagaccggcaagcacggccacgccaagtgccactttgtgggcattgacatcttcaccggcaagaagtacgaggacctgaccccctcctcccacaactgcgacgtgccccacgtgaaccgcaccgagtacacgctgctggacgtctctgacgacggctttgtgtcgctcatggacgagaagggcaacaccgtggaccacctgacgctgcccaag

SEQ ID NO: 3339 - DNA, 395 bp, Chlorella vulgaris
tcgacccacgagtccaatgtatgtgcgacttggtctttgttatcaggcgttccctgtcgtgagagttgtcgtgttgctcattttccccatgttggtatagctactatcatccctgtgcctctcgtggcccattacccggctccgtacttggacaatgactgtgactttgtggccttgcgttgcacgccctgagcagtacctacgcctcatgatcaataattgccaaggcctgtcctgttggatgtcctgtttcctccattgaatactgttaccttcgacttgctctcatgtagcgtttgtgcggattgcgattttttggggggtgggtgctatgggggctgtgccgatcctagtcccatgggtcttgctgtagtcatgcttgccttcctgatttc

SEQ ID NO: 3340 - DNA, 415 bp, Chlorella vulgaris
cccacgagtccaacaaccatggggcgccgcccagcaaggtgctaccggcaaatcaaggggaagccgtaccccaagtctcgcttcagccgtggtgtgcctgactccaaaatccgcatctacgacgtgggcgcaaagaagtctggcgtcgatgccttcccttactgcgtccacatggtcagctgggagaaggagcacatctcctctgaggctcttgaggcggcccgcattgctgccaacaagtacatggtgaagaatgcgggcaaggacgcgttccacctccgcgtgcgcgtgcaccccttccacgtgctgcgcatcaacaagatgctttcgtgcgccggggctgataggctccagaccggcatgcgcggcgccttcggcaagccctttggcgtggctgcccgcgtcggcatccgcc

SEQ ID NO: 3341 - DNA, 291 bp, Chlorella vulgaris
atttttattttttttttcttttttttttcttttattatgtttttgtgttttacatctccctttgatgactacattgcctttaatcctatgtattctctcttcactccccattctgcatgccgtttccagaaactcctcttcatgaacgcgcactgccccattgtctacaagatcaccaactctctgactatgcacggaccccacaatggctacatcctcatagccttacccatcctcaaacacacctttgacatcacccacctgctcaacgaccacacccccatccacctc

SEQ ID NO: 3342 - DNA, 395 bp, Chlorella vulgaris
gcgtccgatacggacccgaccgccccaagttcctgggccccttctccgagggtgctgtgccttccaacctgaacggcgatttcgctggtgactacggctgggacaccgccggcctgtccgccgagcccgagaccttcaagcgctaccgccagattgaggtcatccatgcgcgctgggccatgcttggcgccctgggctgcatcttgcccgaggtcctgcagaggtacagcggcatcaagttcggcgaggctgtgtggttcaaggctggcgctcagatcttctctgacgacggcctgaactacctgggcaaccctgccctcatccacgcccagtccatcattgccaccctcatcacccaggtggtgctgatgggcgccgttgagggctaccgcacc

SEQ ID NO: 3343 - DNA, 401 bp, Chlorella vulgaris
gacccacgagtccaatcacgcgtccgcccacgcgtccgcccacgcgtccgcccacgcgtccgcccacgcgtccgcccacgcgtccggataaccctagccctgcaccgtaaacggcaactggtcagcatgaagaccttcgccttggttttgatcgctgcccttctggggcttgcaagttgtgacgactgggagaagccagagtggtgtcgtgaccacgactgtcccaagttcaaggtggtgaacagcgctgatggctatgagactcggacatacgagcccgcaacctgggcttacgtgaagatgaagggtgtgaggcaccccgacgaagcagtcatggaaggctttgcgcacctgttcaagtacatcaatggtgacaacgaggcgggtgacaacatccccat

SEQ ID NO: 3344 - DNA, 148 bp, Chlorella vulgaris
cgggtcgacccacgagtccgaagggagagtctcctccctttgcgttgcctgccaccatcaactgaagcctctggcaggactgaatgctgccgtgacatggtggagaaggacctcaaagtctttactaaacgaggtaacagccctaggt

SEQ ID NO: 3345 - DNA, 173 bp, Chlorella vulgaris
cccacgagtccaacgggacagtctcctccctttgcgttgcttgccaccatcaactgaagcctctggcacgattgaatgctgccgtgacatggtggacaaggacctcaaagtctttactaaacgaggtaacagccctaggtaaaaaaaccgcaatcacacacacaaaaaccaac

SEQ ID NO: 3346 - DNA, 438 bp, Chlorella vulgaris
ttcccgggtcgacccacgcatccgaccacgcgtccggaagaccgtggctcggtacaatgagctgaaggatctgggcatcaacgtcaagctgctctgcatcggcaagaagggctaccagttcttcatgcgccgcccgcagttcaaggtcgaaggccactttgaggttgggcagacccccaccatcaaggaggctcaggccatcgccgaccagatctttgctgggtttgtgtcggaggacgtggacaaggtggagctgatctacaccaagtttgtgtccctcatctcctccgagcctgtgatccagacgctgctgccgctgtcccccgcgggcgagatctgcgacgtggacggcaactgcgtggacgccgcggaggatgagatcttcaagctcaccaccgtgggcggcaagctggtggtggaatcagagaacgttaccac

SEQ ID NO: 3347 - DNA, 449 bp, Chlorella vulgaris
gggtcgacccacgcatccgaccacgcgtccggattattttgtttcaactgcaaccatcaagcttggatagctgcactcctcgacgccccttagcaccatagtgctgcttctcgatcactcacttggcaacgcggcgtgccagttcaggatgaggtcgacttgcttagtgacgctgctgttggttctaggggttagcgtggaagtgcggggtgcaagctctgggtcctatcctattctggaagactatgaaccccagtacagtatactcaatatcaccggctgggacgactaccccgagggttgctggctgttctccctaccagccattaatgtgcaaattgatgggatcgtctacctgctagccacagagacagcagcagatgacacctccgccggtgtaaatgttgcggcggcttggtgcgagaagaatggttttgacggtgttggtg

SEQ ID NO: 3348 - DNA, 454 bp, Chlorella vulgaris
ttcccggggtcacccacgcgtccgaaaaacgctggtaaaacccatcgcaaaggctgatagccaaggacaaagagcttctagatttatggttgacgacactgacttgggccgctttgcgaacctgatcggcctggtcattgtgggcctgctctttgcctaccactacgtagcagcggaggctaggcagtagcgcggaaaagggcaggcgcaagcagctgggagccatgtcgactgctgcgtttgtgggcggcagcctgaaactcaaaggcggccaggccttgcccgtgaaggacggcatcaagaagaagaaaaagaagaagacaggaacagagcttgcactgatagaggggaccgacaaccagctggcgcagcaggacgggcttcagcaggatggggagggcgaggggctgcctacaggcgtcaaaaacgtgcaccctgaccgcctggtgcttga

SEQ ID NO: 3349 - DNA, 449 bp, Chlorella vulgaris
ccgggtcgacccacgacgtccgaccacgcgtccgcggacgcgtgggggcgtttgcgatgaagtctcaggtcagcgtgcagaaggcttccttcgcgaagccggccctcaaggcctcctgctccaagcgggtggcagtggctcgccccgtgagctgctctgctcagaatgagaaggccaccgccgtggctgccgccgctctggccgttgcccttggctttggccaggttgacgctgcctatgccgacgttgcaggcctgaccccatgcgcggagagcaaggccttcgccaagcgcgagaagaatgaggtcaagctgctgacaaagcgcttgaagcagtatgaggccgactctgcgcccgccctggccctccaagccaccattgacaaaacccatgcccgctttgagaagtacgccaagcagggcctgctgttccggactgacggcctgccc

SEQ ID NO: 3350 - DNA, 479 bp, Chlorella vulgaris
acgctgccagtgccggtcctacattcacgggtccacgcacgcgtccgagttggcagaggtttgcagagcagcatggctgatgcatggctgatgcatggctgatgccctgcattgcctcccgcctgccgccagctgacttatgtgtagtagacgaaccacgggtcgctgtggccagaccaacgttgaggcgtgaaggcccaatggtagcgaagaccccttcaccaaccactggcccttattatgttgcctccagcttgctgaagaggagcatgaattgagcttactatgttttgctgtcttttggcatgctcgttgagcattgtcagcttggtgtaccctttgcttggtatgtttttttgctgggcagccttcattgtacggggcatccctcggtatctccctttctgtgcgtacaagctttcacttcggtatttaatgcaatcacaaaggtgttgcatcacatgatacactgtaaagtg

SEQ ID NO: 3351 - DNA, 405 bp, Chlorella vulgaris
cccacgagtccgcagcggctgtatcacttctccttatcctgccttcaacagatacagttgcactaagatggcccccaccgctgtcatgcagctgcaactgcagcaggttcgcaaggtcactcgccaggccgcctcccataaggcctttgtggctgcccctgtcgccaggaaggccagcgtgcagcccgcagccatcagccgacccgcccccagccggagggtcgctgtcaaggctgttgccgaggccaaggcccctgcagcaaccgcagccagcacccaggagtggtacgcctgcgtggccagcgccgagtttttctacaacgacgtccagaatgagcctttcgctgagcagctgcgtgagaagaagaggtggtttgaggagcaagacaaggaactggactttta

SEQ ID NO: 3352 - DNA, 325 bp, Chlorella vulgaris
cgggtcgacccacgagtccgaccacgcgtccgatcctggctaagaacttggttgccttgatattcaacttgcgcagtgtagcccttgccctttcattccattcctttccaatgcctctcttgctgcgtataggtgccatgcatgcatatatggccccggaagcacttggatattgacttcagcgctgccattggaggactcgatcactgctgccagggcaagtgttcttgcagcagcttattaagcatatggtaaagcgcctaactgcaaaaaaaaaaaaaaaaaaaaaaaaaaaaaaaaaaaaaaaaagaaagaagatcaaaaa

SEQ ID NO: 3353 - DNA, 390 bp, Chlorella vulgaris
cacgcgtccgaccacgcgtccggcgattcgaactaacgcctatccgaggcttcctcgaagacagaagacatcaacatgtctgacggaggggacagcccgaaggccgccgaggcccccgccgccgccgcggctcccgcccccggcgagcccatggacatcaacaccgccatccagctggtgctcaagaaggcgctggctcacgacggcctcgcacgcggcctgcacgaggcctgcagggccattgagcgcggccaggcgcagctgtgcatcctcgccgacgactgcaaccagcccgactacaagaagctgattgaggccctgtgcgccgagcagagcgtcaacctcattgccgtgcccgaccccaagaccctgggccagtgggcaagcctg

SEQ ID NO: 3354 - DNA, 435 bp, Chlorella vulgaris
cccacgagtccaaagtcgggcgcccggctgagagacccaagccccagagaagctggtagcgcataggaaggtcaccctcatgggctgggctggagcttggagggtatttatctatcgataaggaggaagtgtggtgagttcattccatgtacctgcccgtgaggcgcttcttagtggaaaccaacaaaccttcgtggtgctgggctaccgccttgatcactgctattggagttttgagcaggcaagtggccgcctccctttctctctttcatgcatgtgtgcctcaggccgcatatatataatggaacctgtgtgcgctacatatgaatattggcgtcgtgaggcgcggtgtttcattggcagtccccccctttgatataaacttggcattgtgtatgggcctgagcctccaatgtggcatggcctcatgcaaaa

SEQ ID NO: 3355 - DNA, 331 bp, Chlorella vulgaris
gctacagtcggccaacatggttagccgtctgagcaagagccgcaagatgcgcggtcatgtcatcgccggccatgggcgtatcggcaagcacatgaagcaccccggtggccgcggtaacgccggtggccagcaccatcacatgattatgatggacaagtaccaccctgggtacttttggaaggtgtgcatgcgctacttcaacctgaagaagaacaagttccactgccccatcgtcaaccttgacaagctgtggagccttgtgggcgaggaggctcgtgttgaagcctccaaggactcgagcaacgctgccgtgattgatgtcaccaagtat

SEQ ID NO: 3356 - DNA, 375 bp, Chlorella vulgaris
cccgggccgacccacgcgtcagggaaggcagtgcatctgctgaggaccgaaacggacaaccatgcagattttctgcaaaacagacaggactcatgtccttgagcttagctccgaggccactgtggccgatgtcaaggctgccatcgaggccagccagggcatcccctgcgatgcgcagcgtgtgatgttctctggtcgccagctggaggaggaggcctccctggccgcctgcggcgtgtctgacgacagccagctgtacatcctgatgcgcctgctgggtggtgccaagaagcgcaagaagaagacctacaccaagcccaagaagcagaagcacaagcacaagaagatcaagctcagggtgctcaagttctacaa

SEQ ID NO: 3357 - DNA, 370 bp, Chlorella vulgaris
ccgggcggccccacgcgtcagggacgagccgcaaaaatggcgtcggacaagaaggctcagaaccccatgcgcgagatccgcgtcgcaaagctcatcctcaactgctgcaccggcgagtctggtgatcgcctgcagaaggcggcaaaggtgcttgagcagctgaccgggcagcagcctgtgtttggcaaggcccgctacaccgttcgccagtgggccatccgccgtaacgagaagatctcctgccacgtcaccgtgcgcggggagaaggccgtgcagctgctggaggccgggctcaaggttcgggagtacgagctgcttcgtcgcaacttctctgacagcggcaactttggctttggcatcaatgagcaca

SEQ ID NO: 3358 - DNA, 377 bp, Chlorella vulgaris
cacgcgtcagctacaagtagctatcatggcctccctgaccgcctccacaaagcttgtggccgcccgccgggtgtcccttcgcacacaggccaaagctcctcgtcctatgcgcgcaacccgcctagtgtgcagggcagcaagggacgcttctgagaccctggagaaggtcaccaagatcatcgctagccagctcggcactgacgccgataaggtgaagccagagtctgactttgcgagcctgggcgccgactccctcgacgttgtggagattatcatgggcctagaggaggagtttggcattgagatcgaccaggaggatgctgccaagctcaaggacgtgcaggcagtcgctagctatattgtggagaagttgacat

SEQ ID NO: 3359 - DNA, 377 bp, Chlorella vulgaris
gacccacgcatcagcccacgcgtccgtgaggcaagccgggaatcgagttggccttgagccgacgcgtttgacgcccgcagcagcacctaacacacgcaccaggcaccatgctcatctccaagaagaacaggcgtgaggtgtacaagttcctcttcaaggagggtgtgctgtacgcggagaaggacttcaacctgccggagcaccccgagattgagggggtgtccaacctggaggtcatcaagctgatgcagtccatgaagagcaaggacttggtcagcgagcgctatgcctggcgccactactactggttcctgacggacgcgggcatcgagcacctgcgtgagtacctgaacttgcccagcgagattgtgcccgcc

SEQ ID NO: 3360 - DNA, 365 bp, Chlorella vulgaris
cgccgagaccaagaagtggaagctcaccaagctcacctacgacgagcgcaagtccaacctcaaggccaagctggcagagctgacctccgagtaaaggcccaggcctgctgggtgcaagcactgccctctgagggacgggtgattttcattccaagggctgctcgcgcggcgtgtgctgccagcaaggcagcaaggattggtggtagcatggagggcacccgcagcggcggcacgagtggcggcagcggtgctggtggtgtgcgcgcttgagcagggctgcggctgcggctgcctagcacacgcagcatgtgttgggaagcacttctgtctagatgcaagtgttaccaagcaattagggctaaaaa

SEQ ID NO: 3361 - DNA, 403 bp, Chlorella vulgaris
ccgggcggacccacgcgtcagccaacgcgtccgcccacgcgtccggataaggcccacttgtccgttgggaggtgttttaacgctgtccctttgctagcaccgccggccaaacagtatgagcgcccacccttgcttcagcaagtcaatcttgatttcctgctctgtaaaagcccctcggccttcccagcgagcacagcatcaaataccaagatcagccaagggcggcttgttggccgcccctgttgcccatctcactagcagcccgttgagccgcggaatcaaggttcgtaactggcgcgaactgaagcatctgttggactgccaccacgagcgtctggtggtgctagcctgcacaacacagcccgtagaccaggatgacctggggcccttgatgtccaacctg

SEQ ID NO: 3362 - DNA, 356 bp, Chlorella vulgaris
cacgcgtcaagcaacgcgtccgcccacgcgtccgcccacgcgtccgtccgtctctggagccttccccggctgagaaggagacgtcaacatggtggctgccagcaagaagagcaagaagtctcatgagagcatcaactctcgtctggcgctggtgatgaagtccggcaaatataccctgggctacaagaccactctgaagactctgcgcaacggcaaggccaagctggtgattatcagcaacaactgcccggctgtgcgcaagtctgagatcgagtactacgccatgctctcaaagactggcgtgcaccactacaatggcaacaacgttgacctgggtacagcctgcggcaagctgc

SEQ ID NO: 3363 - DNA, 375 bp, Chlorella vulgaris
ccgggcggacccacgcgtcaaccaacgcgtccgtgcgtacgtatctggaagttttcgattgggactgtgagaggagagcactgatagtcagtgaccccccatcttccctaatactcttgtcatcctgtatacagatgtgcgaaactagatgtcctcctgtaccactgcccttgttcactgctggtgctttgagtgcagcgcgttgtcacttgtcctgatttcagtgccacttgtagttgaggcgcacggattgtgcgttgcagtactttgcccacttcgataaagggggcgctcatttttgcaagcgctgcaatgcccttgcgatggctcgcggactggtgttgaactaattgctgtggacttgtgttagataac

SEQ ID NO: 3364 - DNA, 390 bp, Chlorella vulgaris
aattcccgggccgacccacgcatcaggagcttccctgggaaccggcgatcgtgcagggtcatgctcaccgagggacgctgaatctaggagcctggggcgccgtgtggggaggtgtggcttattatcaactgtgttggcggagtagattggagcggcggtcagcatgtccgtcacaaagcagctgcttgcgctgaccctctgcatgctgctatcctacaaggcactggcgctggataaatacatagaagatacagataggttccctggctggcgaggagagctgcccagcagcatcgaggaggtcgctgaggacggcagcgtgggctttggggagctgggcaaggaggtgtggcgaggcagggtggagcaaatttcatggaagccccgcgc

SEQ ID NO: 3365 - DNA, 369 bp, Chlorella vulgaris
accggtcacgtattcccgggcggccccacgcgtcaaggatggacaaggccggacccggcgacaatgttggcatgaacgtcaagggcctggacaagggcaacatgccccgcactggtgacgtgatgatcctcaagtctgacggcaccctgaagcccgtgaaggacttcaccgcccagatccagaccctggacatccccggcgaggtcaaggcgggctactcccccatcggctttgtgcggtgtggccgcgccgcctgcaggatttccaagatcaactggaaggttggcaaggagactggtggcaagaagctggaggagccccacgggctcaaggccaacgagatggccgaggttgtgtttgagccctgcc

SEQ ID NO: 3366 - DNA, 57 bp, Chlorella vulgaris
acgcgtcagggaggccagcgggcggttgacttcagcgcggcttaagacacaaggact

SEQ ID NO: 3367 - DNA, 373 bp, Chlorella vulgaris
gacccacgcatcaggccacgcttctggcaacggtggcgacatcttcatctacgtggggattgaggcagatgtcatgctatatgggattatcattgagcttatgtgggagttggatcccatgttgaatgttatggtggaattttcggatcataagtactatgggttttcaaagcagttttcgaagcacatcaagtggcacatgcaatggctcgccatagaccacgttatggcccacatttcgaagctgatataggagctcaaagaggacctcatagacgtcacggtctttgtcagctcctttggtggcacctagggcggcatgctggccgtctggtttcgcaagatctttcctcaggtcatgtgatggggccat

SEQ ID NO: 3368 - DNA, 355 bp, Chlorella vulgaris
gacccacgcatcaggacacaaggtacagcagggaccgttgaagcctgcaacatgcgtaatagacttctaagttgcagttgggggagcccaagaggccctgctccctctatgagtgtagcctgctgatactgctgtgagaaaatgaatgacgacattatctgcttgcaactaatgacgcagtaatcacaagcggaccttaaagcactgtacttgcagctgagttgagaggtcaggctctgtaaagggggctcccggattgtggctgtggctgcacttgctgattttaccttttagtagggtataagtgagcggagcgcgtgcagctatgcctccttgtgtaacggccctgtaagcc

SEQ ID NO: 3369 - DNA, 57 bp, Chlorella vulgaris
gcgtcagcccaagcgtccgcgtccccgtgcgccgcggctactggggtaacaagatcg

SEQ ID NO: 3370 - DNA, 346 bp, Chlorella vulgaris
cacgcgtcagcgaacgcgtgggcggacgcgtgggctgaaaacaagcacgatggccaaaatcaaggcccatgagctgcggaccaagagcaaggccgacttgctggcccagctgaaggaccttaagcaggagctgggtgcgctgcgtgtcgccaaggtcactggcggtgcccccaacaagctctccaagatcaaggtggtgcggaagtccatcgcccgcgtgttgaccgtggtcaaccagaccacccgcagcaagctcagggaggaggttgccggcaagaagtacgtgcccctggacctgcgcgtgaagaagacccgcgccatgcgcagggcgcttaccaagcatgag

SEQ ID NO: 3371 - DNA, 54 bp, Chlorella vulgaris
acgcgtccgcccaagcgtccgtgaacatcaaaagccgtcacctgaatagggcag

SEQ ID NO: 3372 - DNA, 367 bp, Chlorella vulgaris
tcccgggccgacccacgcgtcagcaaagcttcgccaggggcaccgccctccgcacccccgtgcaggccaaggtggcccggccacagcggaggagcgtggttgttcgtgccgacggcttcatcggcagctccactaaccagatcatggtcctcagcacgatgctgcccatcatcgccggccgctttggcctggcccccaccgccaagctcaggaccacttcttctgtcaagctttacgaggacaagtccgtgagcctggggaccaacgaccccgccggcctcaccgccactgatgtgcttgctctgggcgcccttggccatgctattggcgtcggcatcgtgctggggctgaaggctaccaacaacat

SEQ ID NO: 3373 - DNA, 366 bp, Chlorella vulgaris
ttcccgggcggacccacgcgtcaggttgcgaacttttctgagcacctgcccctgtgaaccgcgttaggtcgattgcgtcatgagttcagctaaacagctggtggatgagacgatcaagggcaaccgtgtggtggtgtggtcaaagagttactgcccctactgccacaaggccaagcgtgcactgaaacgctacttaaaggatagccaagtcgtggtggttgagcttgatgagcgtaatgatggcagccagatccagcaggcgctgggccagataactggtggcacctctgtaccccgggtcttcattgacggcgagttcatcggaggaggggatgataccgagaggttggcaaacaatggcaagct

SEQ ID NO: 3374 - DNA, 231 bp, Chlorella vulgaris
acccacgcatcagtggaacgccaagcgcaggcactggcggaggaccaagctgggcatctaaacggccagcattctcgctttcttgtcggcattgcagcttgggagtgcagacgcctggcctggccgacctttattgttgcggcagcgcagcagcctggcggaaggcagtagcaaccgcagctggggggcagcctcctggcccatgcagtaatgtaacaacctacgctaaaa

SEQ ID NO: 3375 - DNA, 350 bp, Chlorella vulgaris
gacccacgcatcagggagcgggcaagatggtgcagcgtctcacttacaggcggcgtcacagctacgccaccaagtccaacaagcagcgcctggtgaagacgccaggtggcaagcttgtgtatcagctgctcaagaagccgagctccatcccgacttgcccgatcagcggtcagaggctgaacggcctgcccgctcgccgccccgacaccctctctcgcatcagcaagtcaaagaagaccgtccaccgtgcttatggcggccacctcagccatgctgtcgtgaaggagcgcatcatcagggctttcctggtggaggagcagaagatagtgaagaaggtgctcaagctgcag

SEQ ID NO: 3376 - DNA, 360 bp, Chlorella vulgaris
gacccacgcatcagcgatcctgattgctcgttgctggttgcagtgttgagcccagggttgggaaccagcagctgcaacccaagcaaaaatgctgcgcaccgctgcgctgagggcgtgtcgcagggttgagaccctggccctgcagcagcagcagcggtattttgcggaaaaagcagtggcagtggacatggattgggatgccatcacagacctgatccactccgacgaggggaagagggaggtcaccacccttcgctccacctatgctgacatcaagcagaggctagagtcacttgccaaggacccaacccccattgactggaacacttggaggaaggacatcgaccctaagctggtgga

SEQ ID NO: 3377 - DNA, 59 bp, Chlorella vulgaris
cacgcgtcaggcccattcagcaaaagatccacgatgcagaccgcctttgtccgctccgg

SEQ ID NO: 3378 - DNA, 387 bp, Chlorella vulgaris
cggtctaggattcccgggccgacccacgcgtcagctatgggcgttatgaggacctcaaggtagcgtatgtcggcgacggcaacaacatcgtgcactcttggctgcggctagcggcgcggttcaagctcgactttgtctgcgtctgtccaaagggctttgagccggaccaggccacagttgaccttgccagacaagccaggctgggcagcattagcatcagccacgagccgctggaggcggtgaagggggcggacgtgatctacacagacgtgtgggcgtccatgggccagaaagaccaggcggaggagcggaagcggctgtttaaggggttccaggtgaacgaggccatgctggaggctgccgggccccaggtcaagttcatgcact

SEQ ID NO: 3379 - DNA, 421 bp, Chlorella vulgaris
cacgcgtcagggggcgaccgccaaggaggtgctgtatggcgcccggggcactggcgtcttccagttcaacaaggtggtgggagtgtcgtcaacaacagccgacggcgtgacgtttgcggtcaccgccctccagcgcgacaacgccctggacatggccctgaagaccacctacaccgcacccaagtactctctcataggcaccatcagccaagccggcaagctgggccttgcagccacgtacaaggagctagctcctggcctcaccctggggctgtcgggcacccttccggatctggactcggctaacctggcggtggactactccatcccgcacgtcacgctgcgctccgctgtgagcctgacggccgcccccaaaggcaaaccggctggcaacaaccggttacaacaacttcaccctggg

SEQ ID NO: 3380 - DNA, 378 bp, Chlorella vulgaris
aattcgcgggccgacccacgcatcaggaaattccttgtcctcgtgcgatggtgactgtggtgttcgcgcaagcgcttaattctctacctcggggccggccccctactccttagtttagtttgactgtcttgcgattgtggctgtgagtgtactatagagattctttgggttgctgcactgcacttggtagcctggtgcgtggcacctggggtctccctgtcggggagcgctgcagctggcctgccgggtttttggacaaaaaggtgacattcgacaagtttagtgggctgcgcctggggcggcagggtggcgcctgctgcactgggtgctgaattgcctgctgcacacatttttgcgtgctcttgtttggtgtctgga

SEQ ID NO: 3381 - DNA, 369 bp, Chlorella vulgaris
acccacgcatcagggtgatccccgtctcgcaatagttccagggcaatcactatgcaggcaaccatgatgaagaccttcggcgccagcctgcgcaaggctgtgcccacccagggcaagggcacccgccaggtgacccgcgcctccgtggagtggtacggccctgacagggccaagttcctgggccccttctctgagggctccacccccagctacctgaagggcgagttcgccggcgactacggctgggacactgctggtctgtctgccgatccccaaaccttcgctgcctaccgcgaggttgaggtcatccatgcccgctgggccatgcttggcgccctgggctgcctgacccccgaacttctgcaaaac

SEQ ID NO: 3382 - DNA, 64 bp, Chlorella vulgaris
ttcccggctcgacccacgcgtacggccatatgcagctgcagccatggttggagccttcctagcg

SEQ ID NO: 3383 - DNA, 389 bp, Chlorella vulgaris
acccacgcgtacagggcctcaactacgacgagtggttcgagaacctgaagcacaagaaccaggtgcacgtggaggtgtactgagcggttcgcccctaccggcacttgtgaagcagcctacccttggtctatgtcctcagctgcactagctatactgccaagccgtgtcctgggactactacagccatcgtgtgggtgtctggtcaccgaatgggatgtgtaagctgacactgtgtaaaaccatcgccgcacccagtgctggcgaaactgtgtttgctgttgtgttgctttttcttcgagcctgcgagtccgcgcccgcccttgggccgtcttgccttcagctttttggtatttcagaggtgtccccgattggtctgggtccctgactgg

SEQ ID NO: 3384 - DNA, 370 bp, Chlorella vulgaris
cacgcgtacatggaatataacaaacagaaatggtgctgaaacttgggatcaacgggtttgggcgtatcgggcgcctggtgatgagggctgctatggagagggacgacgttgaggtggtggcattcaacgaccccttcatcgatgccgagtatgcggcctacatgttcaaatacgacaccatccacggccagtacaagggcacggtggagggcaaggaggacgggctatatgtggacggcaagaagatccactgcttcacccacatgaaggctgacgagatcccctggggctccgtggttgccgagtacctgtgtgagtccacgggcgtgttcaccgaggtggacaacgcctccgcacacctcaagggccg

SEQ ID NO: 3385 - DNA, 414 bp, Chlorella vulgaris
ggtaccggtaccgaattcgcggctcgacccacgcgtacggttgctcggtgcgcgtctcggccttcaaaccactcagaatgcagaccgcccttgccaccagcttcgccaaggcccctgtggccacccgcaccgctggtgccaggcccgcacgcaccgttgccgtggtgtgccgcgcgcagcagcagcagaaggccgcagcagccctggccgccgtgcccgccctgctggccgcaagccctgcctttgctctggttgatgaccgcattgccactgagggcactggcctggctctcggcgtccacgaccccgccctgttctttgccattgctattgtcttcaccggtgtgtgggcagtgttctactctggggccaagagcctgggcggcggcaagggcgatgactctggcctgaccc

SEQ ID NO: 3386 - DNA, 381 bp, Chlorella vulgaris
aattcgcggctcgacccacgcatacgcggacgcgtgggtgcatgtacccctaaactctcttttctcttcccggtatcgcgctggcagcgttgacgttgcttgtgatgctgcactggcccactggccgctactgggtacgccaggaagcagcccagcggtctggctgatgggggggttgctaggttgcatctagaaagaacgcacacttatgatgggtcttggtgtcttttctggggcttgctgggaacgtcctggcttctgctcagctaccgacggaaaacttttgagactgctgagcgtatgggacattggaacactgttcgccagctacctagctagcttgcttgcacctgcggaaaccagctctctccggtataaacg

SEQ ID NO: 3387 - DNA, 411 bp, Chlorella vulgaris
aattcgcggctcgacccacgcatacgcggacgcgtgggcgtggaatcccccgtcgacaacaggtccaaggttcacaagatgcagaccctctctgcccgtttcggcgtccgcgcccctgtctcccggggcacccgccaggtgacccgcgcctccgtggagtggtacggccccgaccgcgccaagttcctgggccccttcaccaaccccccttcctacctgaagggtgagttcgctggcgactacggctgggacacctctggcctgtccgccgatcccgagaccttctcccgctacagggaggttgaggtgatccatgcccggtgggccatgcttggcgcccttggctgcgtcgtgcccgagctgctggaccgcaacggcaccgtcaactttggcgagaacgccgtgtggttc

SEQ ID NO: 3388 - DNA, 63 bp, Chlorella vulgaris
gctcgacccacgcgtacggttagccgtctgagcaagaaccgcaagaagcgcggtcatgtcagc

SEQ ID NO: 3389 - DNA, 382 bp, Chlorella vulgaris
aattcgcggctcgacccacgcatacgggcaagctcctttcagggtgcgctggggcggcgcctgcttacctgttagcttttccaacccacggttacctccttgttttctccctgtacgcatgcccgtatgactggtgagcacccttttaagaaagtttgctgggccgagtctgagtttggtcttaggttgtcgtggaagtgactgtatcctgtactgccttgtgtctttgcatctgatcggtgtggatctttgcagtaaattgtgttgtggcgttgggctgttcaacatgctcgtggagtgctcctcggatcttgtatgggtgccagcagtgcttcgttggagaccctttcgctagcttcgctgggtaactgaccgtgaaggc

SEQ ID NO: 3390 - DNA, 374 bp, Chlorella vulgaris
cccacgcgtaagacttgctcaagcgcaactgctagcttggaagttaacgatggccgccctgaccgctacctccttcgctggggcccggctccaggccaggacttccaaggtccagccccgcagccgtgctgtggcctgcgtgcgggcagacgctaccaagtatgcagctgctgccatggccgccgtgatcgccctgactcccgctgctgccaacgctggcattgttgaggacctgcttgctaagtccgacgccaacaaggacctgcacaaccagcagcgcctggccagcagcaacgccaactttgcgcgctcgcgcaccgtcagcgaccgcacctgcaccttccccaacaacttcctgggctgcgacctgggca

SEQ ID NO: 3391 - DNA, 54 bp, Chlorella vulgaris
gctcgacccacgcgtaagtgctatcatgggtgtcgaagtgcagactgtcactcc

SEQ ID NO: 3392 - DNA, 62 bp, Chlorella vulgaris
gctcgacccacgcgtacgatctgaagagattgaatgccccgaagcactggatgctcgacaag

SEQ ID NO: 3393 - DNA, 392 bp, Chlorella vulgaris
tcgacccacgcatacggaaaacaagcacgatggccaaaatcaaggcccatgagctgcggaccaagagcaaggccgacttgctggcccagctgaaggaccttaagcaggagctgggtgcgctgcgtgtcgccaaggtcactggcggtgcccccaacaagctctccaagatcaaggtggtgcggaagtccatcgcccgcgtgttgaccgtggtcaaccagaccacccgcagcaagctcagggaggaggttgccggcaagaagtacgtgcccctggacctgcgcgtgaagaagacccgcgccatgcgcagggcgcttaccaagcatgagaggaccgtccggactgagaagcagaagaagaaggacgcagccttcccccgccggaagttccccgtt

SEQ ID NO: 3394 - DNA, 387 bp, Chlorella vulgaris
cgacccacgcgtacgcggacgcgtgggcgctgcatccgcctatactgcgagcgcaccggcaacgaccactggctgggcctgctggactacctggtcggcaatgtcggcctggtcttcacccagggcgacctcaatgaggtgcgcacgcaaatcggtgagttcaaggtgggcgcccccgcccgcgtgggcctggtggcccccaacgacgtgaccatccccgccggcaacaccggcatggacccctcgcagacctccttcttccaggccctcaacatccccaccaagatgaacaagggtactgtggagattgtgtctgacgtggtggtgtgccgccagggcgagaacgtgggcggctctgaggccaccctgctgttaaagctgggcaac

SEQ ID NO: 3395 - DNA, 65 bp, Chlorella vulgaris
cggctcgacccaagcgtcagctcgactggacgtgcggcagcagcgacgatggtgctgtcgtgcga

SEQ ID NO: 3396 - DNA, 61 bp, Chlorella vulgaris
  unsure (1)..(61): unsure at all n locations
gctcgacccacgcgtacgcggncgcgtgggttgccaccgagaactttacgcatatcctgcg

SEQ ID NO: 3397 - DNA, 56 bp, Chlorella vulgaris
cgacccacgcgtaagcccacgcgtccgcccacgcgtccgggtctgtctgccgatcc

SEQ ID NO: 3398 - DNA, 428 bp, Chlorella vulgaris
attcgcgtctcgacccacgcgatacgcccacgcgtccgggacaaccatgcagattttctgcaaaacagacaggactcatgtccttgagcttagctccgaggccactgtggccgatgtcaaggctgccatcgaggccagccagggcatcccctgcgatgcgcagcgtgtgatgttctctggtcgccagctggaggaggaggcctccctggccgcctgcggcgtgtctgacgacagccagctgtacatcctgatgcgcctgctgggtggtgccaagaagcgcaagaagaagacctacaccaagcccaagaagcagaagcacaagcacaagaagatcaagctcagggtgctcaagttctacaaggtacacgacagcggcaaggtgcaacgccttggccaaggtttgccccaattgcggccccggcatcttc

SEQ ID NO: 3399 - DNA, 373 bp, Chlorella vulgaris
aattcgcggtctcgacccacgcgtacgcccacgcgtccggggggagatagggtgatatatactcctagcagccctcagtcgaaggacatgttgtggcgcgagaaccgatggaagcagtgcgggagggttggcatgtcacaaggaccaggttgggcgtgccacgtatatggcagtcatgtagccgaactgtttggtgggaatagtggccatcctgagtgacagtgtgaggtggggggttgatggaattgtggagaagcagcgctccgggccaggctgccggtttttgtctatttccctttgttgtaggtgtctatggcagctggtggttgggcacatgaaatctgtacttgtaatgttgggcttttcgggctcc

SEQ ID NO: 3400 - DNA, 433 bp, Chlorella vulgaris
gaattcgcggctcgacccacgcatacgggcagtgcatctgctgaggaccgaaacggacaaccatgcagattttctgcaaaacagacaggactcatgtccttgagcttagctccgaggccactgtggccgatgtcaaggctgccatcgaggccagccagggcatcccctgcgatgcgcagcgtgtgatgttctctggtcgccagctggaggaggaggcctccctggccgcctgcggcgtgtctgacgacagccagctgtacatcctgatgcgcctgctgggtggtgccaagaagcgcaagaagaagacctacaccaagcccaagaagcagaagcacaagcacaagaagatcaagctcagggtgctcaagttctacaaggtagacgacagcggcaaggtgcagcgcctgcgcaaggtttgcccccagtgcggccc

SEQ ID NO: 3401 - DNA, 57 bp, Chlorella vulgaris
cgacccacgcgtaagcgagattcggcgatcgccccttccttccttcctccatagtca

SEQ ID NO: 3402 - DNA, 375 bp, Chlorella vulgaris
cccacgcgtcagtctacagtcggccaacatggttagccgtctgagcaagaaccgcaagaagcgcggtcatgtcagcgccggccatgggcgtatcggcaagcacaggaagcaccccggtggccgcggtaacgccggtggccagcaccatcacaggattatgatggacaagtaccaccctgggtactttggcaaggtgggcatgcgctacttcaacctgaagaagaacaagttccactgccccatcgtcaaccttgacaagctgtggagccttgtgggcgaggaggctcgtgttgaggcctccaaggactcgagcagcgctgccgtgattgatgtcaccaagtatggcatcttcaaggtgctgggcaagggccaact

SEQ ID NO: 3403 - DNA, 383 bp, Chlorella vulgaris
ttcccggtgccgacccacgcgtcagctaacgcctatccgaggcttcctcgaagacagaagacatcaacatgtctgacggaggggacagcccgaaggccgccgaggcccccgccgccgccgcggctcccgcccccggcgagcccatggacatcaacaccgccatccagctggtgctcaagaaggcgctggctcacgacggcctcgcacgcggcctgcacgaggcctgcagggccattgagcgcggccaggcgcagctgtgcatcctcgccgacgactgcaaccagcccgactacaagaagctgattgaggccctgtgcgccgagcagagcgtcaacctcattgccgtgcccgaccccaagaccctgggccagtgggcaagcctg

SEQ ID NO: 3404 - DNA, 396 bp, Chlorella vulgaris
attcgggcgtcgacccacgcgtacggcagaggggcactggctgtatgggtgggatgcacagctggacttcctgataaagcgctggccgcagccgctgaaggagaaggagccccagcttgtgtggcggggccgctattgggagggagccagggacaggctgaggaagcgctttgtggagtgccaaggtaaacttaacgagatgggcaacaagcgggccgcggacaagttcaacatctggaaagagcagggccatgtggacctgagcactgcctgccgcttcaggtatgtaggctacctgtagagcaaggcctggagcaccagcttccaccagaagatggcctgcggctcagtctttgtgacgccaaggctggagtattacgagttctacaccaagga

SEQ ID NO: 3405 - DNA, 429 bp, Chlorella vulgaris
aattcgcgtctcgacccacgcgtacgcccacgcgtccgcccacgcgtccgcccacgcgtccgaacctctaaaggtcatccatgaagatttaatgggctttttaacgcgtgcctactgccaaaaggatgagctcttgactagcgagcttcatactgcggttatgagggtgtctcacatccgtgaggtggtccataacccggcaaggagcttctggagaggtgactggggcgacggctttgtgcagatggcggaagacctgacaaagcagcagttggagttaaggttgcctgtcatgcagtgcaaggtgtgtgttaacataaataaataaataaataaatacgcccaggcctcgccgtccagccgtagctgggcgccgagtgatgcccagtgggcaccggccaggggcgtgggttaagggatcgccatcgg

SEQ ID NO: 3406 - DNA, 391 bp, Chlorella vulgaris
aattcggtcgtcgacccacgcgtacgctttgtagcactccacaggacacgatgcaggccctgcagaagcctttcaccgcccagcgggcccagctgcagaaggctgcttccagccggacctccgtccgcgctcctgtggttgtgcgtgcccagaagcaggaggtggaccgccgtgccgccctgggtctgctagctggtgccgctgccctggtcgccggtgcccagccctctgaggccgcctatggcgaggctgcccatgttttcgccagcaagccgaccaataccaagggcttcaatgtctactcaggcgagggcttccaactgctgattccctccaagtggggcgcctgcaatgagatggacttccccaacagcatcttccggtaccagga

SEQ ID NO: 3407 - DNA, 317 bp, Chlorella vulgaris
aattcgccgctcgacccacgcgaccgagcttcgcaagacgtctcggggccaagtcaacaatatgaagagattgaatatgcagaagtactgcatgggcaacaaccttaggggcaacgttgcccgtaagcggaacaagagcaccaacatgatggtggattcctctgggaacaacatgcacctgaagaagaagggcatctactctctcaagaacaccaatgtgacgatgatcctgatccaccacatcgataacagttgacagcaaggattgcatggacacgaccgaccccatgggcaacgactatgtcgtcaacaggttt

SEQ ID NO: 3408 - DNA, 58 bp, Chlorella vulgaris
cgacccaagcgtacgcccacgcgtccgcccacgcgtccgcccacgcgtccggcgtcgc

SEQ ID NO: 3409 - DNA, 54 bp, Chlorella vulgaris
gacccacgcgtacggccaatcccagccctcccagtccagtctcgacacttattg

SEQ ID NO: 3410 - DNA, 422 bp, Chlorella vulgaris
cccacgcgtacacccgtcgacaacaggtccaaggttcacaagatgcagaccctctctgcccgtttcggcgtccgcgcccctgtctcccggggcacccgccaggtgacccgcgcctccgtggagtggtacggccccgaccgcgccaagttcctgggccccttcaccaaccccccttcctacctgaagggtgagttcgctggcgactacggctgggacacctctggcctgtccgccgatcccgagaccttctcccgctacagggaggttgaggtgatccatgcccggtgggccatgcttggcgcccttggctgcgtcgtgcccgagctgctggaccgcaacggcaccgtcaactttggcgagaacgccgtgtggttcaaggccggtgccgccatcttcggcgatgacgggctgaactacctggg

SEQ ID NO: 3411 - DNA, 241 bp, Chlorella vulgaris
ctttttgtttttttttgttttttttctttttttctttttttttttaattttttttttttcttttttttgcgccagggcctaaaacaggcacacacccaaacaagtaatccgcccaacgggcccaccccaaaccaccaccccacgggggtcacccccgcccactcaaacattgccggccaagggcggcaggccacgcacatcgccaggaggggggacaaggacgagccggcacgtgcccggg

SEQ ID NO: 3412 - DNA, 436 bp, Chlorella vulgaris
aattcgggcgtcgacccacgcgtacggaatgcgggcaaggacgcgttccacctccgcgtgcgcgtgcaccccttccacgtgctgcgcatcaacaagatgctttcgtgcgccggggctgataggctccagaccggcatgcgcggcgccttcggcaagccctttggcgtggctgcccgcgtcggcatcggccagatcctgctctccatccgctgcagggagcagcacgcagtggtggctgaggaggctctgcgccgtgccaagttcaagttccccggccgccagaagatcgtggctagcaggaactggggcttcaccgactacctgcgcgacgactacctggagtggaagcgcgagggccgcctggtgaacgatggcgtgaacgtcaagctgctgggctgccacggccccctggagaagcgcgagtctgcgcacatct

SEQ ID NO: 3413 - DNA, 56 bp, Chlorella vulgaris
gacccacgcgtaaggtacattgtgcgaccttgatcggccacccaagaagatggcaa

SEQ ID NO: 3414 - DNA, 57 bp, Chlorella vulgaris
gctcgacccacgcgtacggcttctacagtcggccaacatggttagccgtctgagcaa

SEQ ID NO: 3415 - DNA, 407 bp, Chlorella vulgaris
aattcgcggcgtcgacccacgcgtacgcccacgcgtccgaacagcctggccatgcagacgctggccagccaggacgcggccagccacgaccagtacctcaagctgctgcgctttgacgaccagatagcggagctggcctcccgccgaggcctgctggtgcggttcctgatcaagagcgtgaagacgtaccagccgcagccggagatggtggtggaggcgcccgagttcatgacggtcgagtacctcaagcgacgcatcatgaaggccaagctgctgcgtggcgagtttgtgaaccccatccgcttcatcctgcgcaagaagatcctgaacgagaacaacgacctgttcggcatggatgacgtggcctcccgggaaccaacaggcgacgagatcttcctgttccacca

SEQ ID NO: 3416 - DNA, 304 bp, Chlorella vulgaris
gacccacgcgtacgcagttgcgtgggttagagcgcaaagtatcaggagccgagcagcgtaacggcagtcccagtgtccccccagggcgaaaaatcgagaagacgaagttgctcctgaacagttgcgatctgatatggaccggatgattctgatcccaaagaggacggacgatgaacgggtgcagtgcatacacgatgacggctttgtccgcaatgcaacgtctgcctactcagtcaacagtcaaatgcgatagacgctgacaacccctctcttaaggcaacgaccttatgtcacctcacaaggt

SEQ ID NO: 3417 - DNA, 425 bp, Chlorella vulgaris
aattcgcggctcgacccacgcatacgcggacgcgtgggcggacgcgtgggcgcgaaccgagtccgaggcggtgcgctccaagagcctgtctgttcgcctgcctgtaaggccggttgtttaaggtcgggcacttctaaagaacgtcgagcagccatgcttgcctccgccttcgctggtgccaagctgggcagcacgcccttccaggggcagcagctgctggcacagaggtcctcgctgcgtgcagcccctgcaccattcagtgtggaggctgcccacaaaaagggtgctggatccacgaagaacggccgtgattccaacagcaagcgccgcggcgtcaaggtgtatggcgggcagcccatccccgccggcggcatcatcatcaggcagctgggcactagggtgcatcccggccagaacgtgggcct

SEQ ID NO: 3418 - DNA, 59 bp, Chlorella vulgaris
gctcgacccacgcgtacggcgtgggcaaggcagcgagggtctgagtttggcgtcaagac

SEQ ID NO: 3419 - DNA, 59 bp, Chlorella vulgaris
tcgacccacgcgtacggtcaccttttccggggtttccctttggccagctgcttaagatg

SEQ ID NO: 3420 - DNA, 73 bp, Chlorella vulgaris
ccaaaaggatccaagcttacttacccttgcatgcaacttcaaaactcttcaaaagtgtcaccaaaattcaatt

SEQ ID NO: 3421 - DNA, 423 bp, Chlorella vulgaris
gacccacgcgaccggctcaaggaggctggcattccctccaagcttgcccccaccattggcattgcagtggaccaccgccgcaagaacaggtcccttgaggggcttcaggagaatgtgaaccgcctgaaggcctacaaggccaacctggtggtgttcccgcgccgcgccggcaagcccaaggccggcgatgccagcgcggaggagctcaaggcggtcgcgcagctcagcggcccggtgctgcccgtcacacgcgctgcgcccgctctggagaaggttgccatcaccgccgagatgaaggccgagaaggcataccacaccctgcgcacggagcgcatgaatgcccgcctggttggcgtgcgcgccaagcgcgccgcagaagaggcaacagcagccaaagacgccgcataagccgggggccgccgt

SEQ ID NO: 3422 - DNA, 406 bp, Chlorella vulgaris
aattcgcgtctcgacccacgcgatacgcacgctgctggacgtctctgacgacggctttgtgtcgctcatggacgagaagggcaacaccgtggaccacctgacgctgcccaagggcaccgacgagctggagaagctggcggtgcagatcagggaggactttgccaccggcaaggagctggttgtggccgtgctgtcggccatgggtgaagagatgatctgtgccgtgaagactgttggtggcgcataagcagctggcgtttagcagtgagggcccttgctggggcctgtgcagcagcagtagccaagatgcagggcctttggggttccatcgctggcagcatcgttggcacgacggcagctgatgcagcagcggtgccagactcatagggagcgctggctggggggc

SEQ ID NO: 3423 - DNA, 102 bp, Chlorella vulgaris
cgacccacgcgtacgcccacgcgtccgcccacgcgtccgcccacgcgtccgcccacgcgtccgcccacgcgtccgaaaaaaaaaaaaaagtataaaaaacag

SEQ ID NO: 3424 - DNA, 355 bp, Chlorella vulgaris
ttgtgaaattctcaggttagccccgctgggtttcagtaacgattgagacccagctcaatccatccgcaacccactagtactcctctgcacatgaatacccatgcagatatcagtcaaacacaaatgtgcagtttcccgctgcgtctgacatcctcctgtgcttgacgacctgagagcaagtcatgaatgagcgctacaagcacatatgcatactctgcagagcaggtgtcacatgataacccccagattcagtggagcaagtcagggctgcacttagggttcggtttttgactaggatttatcagccaaatgttgaaaaccttggccgcatttgcctttagatccttaaagaata

SEQ ID NO: 3425 - DNA, 368 bp, Chlorella vulgaris
cggctcgacccacgcgtacgcccacgtcgacaacaggtccaaggttcacaagatgcagaccctctctgcccgtttcggcgtccgcgcccctgtctcccggggcacccgccaggtgacccgcgcctccgtggagtggtacggccccgaccgcgccaagttcctgggccccttcaccaaccccccttcctacctgaagggtgagttcgctggcgactacggctgggacacctctggcctgtccgccgatcccgagaccttctcccgctacagggaggttgaggtgatccatgcccggtgggccatgcttggcgcccttggctgcgtcgtgcccgagctgctggaccgcaacggcaccgtcaactttggcg

SEQ ID NO: 3426 - DNA, 137 bp, Chlorella vulgaris
cacgcgtccgttcgggaggccacatggtgtgcactgtgatgccaagagcgggcgcttctggtattattcatggttgctgcgtgattttcgggggtcaggtggtgggttttggcgagtatgcaagcggtgcagccccc

SEQ ID NO: 3427 - DNA, 431 bp, Chlorella vulgaris
cacgcgtccggacagctggggtgtagtccgcctgccgcgcaagaccatcgtggtctgcgcaaggtcgcctgcatcggcgcctggcacccggcccgcgtgtcctggaccgtggcccgcgctggtgccatgggttacaaccaccgcacggagatgaacaagaaggtgtaccgcgtgggcgtgaacggcgacgccagccacaaggccaccaccgagtttgatgtgaccgacaaggacatcacgcccatgggcggcttcccccactacggcgaggtcaaggaggactacatcatgatcaagggtgcgtgccccaggcacaagaagcgcgtgatcaccctgcgcaagaacctgttcccccagaacagccgctccgcactggaggagatcaagctcaagtctgtggacaccagctctaagtttggcacggccgcctc

SEQ ID NO: 3428 - DNA, 431 bp, Chlorella vulgaris
  unsure (1)..(431): unsure at all n locations
cacgcgtccggcacgcgtccgcacacgcgtacgcaagactttgtggcgcccggcagtacgctccgtcaagtccgttccttcaacagcagccagtaacggtccttctaggcgcggcttccatgtttgtgctgctgcacaggcagtcccttctgaagcagcagtgaagagagatgatgttattacaagcgaaccttacaacaatatcactgattccatcttttcaaaaattggagtcaacctgcacaggcagcccaaccaccccataggaatcatcaaatcagccatctatgattactttgatcgtgagcaccctgngatattccacacctttgatgatctgtatcccgtggtcagcaacaaggcgaattttgatgacatgncttgtgcagcccgacatgtgtcgcgcaacccaatgacacatactatgtcaa

SEQ ID NO: 3429 - DNA, 365 bp, Chlorella vulgaris
ccacgcgtacgcggacgcgtgggcgagggtgctgtgccttcctacctgaacggcgagttcgctggtgactacggctgggacaccgccggcctgtccgccgaccccgagaccttcaagcgctaccgccagattgaggtcatccatgcccgctgggccatgcttggcgccctgggctgcatcttgcccgaggtcctgcagaggtacagcggcatcgagttcggcgaggctgtgtggttcaaggctggcgctcagatcttctctgacgacggcctgaactacctgggcaaccctgccctcatccacgcccagtccatcattgccaccctcatcacccaggtggtgctgatgggccccgttgagggcta

SEQ ID NO: 3430 - DNA, 394 bp, Chlorella vulgaris
cggctcgacccacgcgtacgcccacgcgtccggttgcctgccggttctcgacccggtctggtcctgctggtgaacagtgcacaatgccgtctgccaccaagctcgtcaagaaggaggcgtacgacgccaagctgtgcgagctgctggacacccacaccaaggtgttcctagtccatgccgacaatgtgggctccaagcagttcatggatatccgtgcggccatccgcggacactccaagattttgatgggcaagaacacgctgctgcgccgctgcatccgcctatactgcgagcgcaccggcaacgaccactggctgggcctgctggactacctggtcggcaatgtcggcctggtcttcacccagggcgacctcaatgaggtgcgcacgcaaat

SEQ ID NO: 3431 - DNA, 302 bp, Chlorella vulgaris
  unsure (1)..(302): unsure at all n locations
gcctcaatgcataagaacctgcttcagcctggtgcttgggtgtctggctgggccggctgctgggcctgctcggctgcgccgctcgctgacggctgtaacgcncggacagcggcagctgctgcctgatcagcgcttaggcttgcttgggcggtggcagtgcggtgcagcgcagtgcagcagccttggaggcggacaaggagctgctgtgtggcagataacagttcatgtgaggtgactgttgtcagcctggccgctgtgcttccttatcctgtggtgctctgtctgtaagtgctcgcttcaca

SEQ ID NO: 3432 - DNA, 410 bp, Chlorella vulgaris
cggctcgacccacgcgtacggcaacggaaagcaccaagatggcgaaggacaagtctcgctccgccgaggtggtgacccgcgagtataccattaacctgcacaagaggctgcatggcataaccttcaagaagagggctcctaaggccatcaaggagattaagaagtttgcccagcaacaaatgaagaccagcgacgtgcgcgtggacgtcaagctgaacaaggccgtgtggagccagggcatcaagaacgtgcccaaccgcctgcgcattgtgatccagcgcaagcgcaacgaggacgacgacgagaaggaggagatgttctccctggtcaccctggccgaggaccagagcagcaagggcaagggcgtggtggtcctggaggcataaacacacaaaagcccctccccgggg

SEQ ID NO: 3433 - DNA, 171 bp, Chlorella vulgaris
ctggaacctttaacctttttaacaccttaaaaaaaccacttgttaaaaacctggctttttttttttttaaagatagctggttttttaaaaaaaaaagatagattggctaaaagaaatacataaaaaaagttattgttttataaactaaaaaaaaaaaaccgtcacaaaaca

SEQ ID NO: 3434 - DNA, 346 bp, Chlorella vulgaris
ggctcgacccacgcgtacggcgtgatgctggcggggccacctgtggggaggaccgcgctgttggcagcccttggggggggtgctggcaggactaccgtgcccagcccgcagtggtgattgcagcctcagcctactccgtacacagtactcctcgatctttattgaaattcatttgtaccagaaggcagtcactagtggcatctttgttcagaatcctggtaggcagcgtgtaggtagggtttgtttttgacggcagacagtgcgaacagagcagagttagtgtgaactgtactaaagccgggacgcaggatgctttgaagcttgacctaaaggcaatgcgaacaga

SEQ ID NO: 3435 - DNA, 356 bp, Chlorella vulgaris
tcccggctcgacccaagcgtactgacctcccatctcgtgcggctttcgcctttgaagccggcagcaggtcaccatgggtcgcgtcaggaccaagaccgtcaagaaggcttctcgtgtcattatcgagaagtactataaccgtctcaccatggactttgacaccaacaagaggatttgcgaggaggtggccattattcagtccaagcgcctgaggaacaaaattgctggcttcaccacgcatctgatgaagcgcatccagcgcggcccagtgcgcggcatctccctcaagctgcaggaggaggagcgtgagcgtcgcatggactacatccctgacgagtcggccatccagaccgacg

SEQ ID NO: 3436 - DNA, 520 bp, Chlorella vulgaris
  unsure (1)..(520): unsure at all n locations
cacgcgtccggaacacacaggtgtgtcagtatgcatgggatgcgtcacgttgccttcttcttgatggtgttacgtgccaggtaccgaagatgagctgtctatctttgctaccagtgtctggctggcagcgtgcgtgtatgctttgctggaccatgttgtatcacgttgatgcgtacgtatctggaagttttcgattgggactgtgagaggagagcactgatagtcagtgaccccccatcttccctaatactcttgtcatcctgtatacagatgtgcgaaactagatgtcctcctgtnacactgcccttgttcactgctggtgctttgaatgcagcgcgttgtcacttgtcctgatttcattgccacttgtagttgaggcgcacggattgtgcgttgcagtactttgcccacttcgataaatgcggcgctcatttttgcaagcgctgcaatgcccttgcgatggctcgcggactggtgttgaactaaatgctgtggacttgtgtgagatagcattccctgt

SEQ ID NO: 3437 - DNA, 218 bp, Chlorella vulgaris
acgcgtccggcacgcgtccggctggtggtaaagactgtgcgctgccgttaaggacaggagcgctgggatgctttggcactgatattgtgtaaagaccctgtgtgtaccaaagcgctgtataacttgacatctcctttttgctctccttgtttgatgtgctaagtgttttcgacgggatcgccactgagtggcggggtgtaaccaaactggctttaaaa

SEQ ID NO: 3438 - DNA, 350 bp, Chlorella vulgaris
cggctcgacccaagcgtacggtctgctggtacattgatggatttggcacgaggggcgatgctctcgcaaggcttggggcagccccggcgaataacacagctatcttcacttccaaggtcaaggagccgctcaatgcctttgatcaacgcccaggcaggagggttccgccgctggctacgcgtcaaggcacgtgagtggcagctgggggatggcatggcaagcgctcctgcgtcagaagcagcacggctgccaccctttccaaggcaccccgcgcaggagaagccagccaaaaaggccgaccggttcgcggccttgagcgagcgctatgtgaagcagggtaagcagccgaa

SEQ ID NO: 3439 - DNA, 376 bp, Chlorella vulgaris
cgacccacgcgtacgcccactcgtctgcctaaccctcgacctgcgcctgaaggcaagcgtggaaaccatttgggattctgctgtgtcgtttaaggctggtaccaccatctacgacaatcatcacgctaaattacttatctcaaagcatcaactggtctaagcgtgatatccagtctctgcttacaacgaggctttcatgtcatcctcataaggacatgatcatgctttccctgtcagcgattgtgggggtttcaaacgtgaaggtcaccacactgagtcagtcgatgatgaccatggacttcgtgacctagctctatacctggagacattagcacagcttaatgacagagacatgaataaaggacctgtgtcaata

SEQ ID NO: 3440 - DNA, 354 bp, Chlorella vulgaris
ggctcgacccaagcgtacgcggacgcgtgggggcaacttggggagtgatataaaccagggtgtacaagcgggctatacgctgacgtggctgacggtgctgtgcacagcaatgggttacttcatccagtgtttatcaaccaagctaggcgtggcaactggcatgcacctggcagaacactgcaggctggagtacccccgctacaagcgcatcacgctgtgggcgataggcgagctgggcatcatcacctgcgacatggtggaggtgatcggaggggccgtggctttccagacgctcacaaatggcgccatcccgctctatgcaggggtgatacttgttgtggcaaacaccttatg

SEQ ID NO: 3441 - DNA, 357 bp, Chlorella vulgaris
gctcgacccacgcgtacggcactccttgtggctgtctcgggcaaacaaccgcaaagatgcagactgctttcgccggcaaggtcgctctgttcaagggcactgtggctgcccccaaggcgcagcgcaggtccctggttgtccgcgcgggccagtatgatgaggagctggtgcagaatgcgaaaaagatcgcctcccccggcaagggcatcctggccatggacgagtccaatgccacctgcggcaagcgcctggagtctatcggcctggagaacaccgtggagaaccgccaggcgtaccgcgagctcctggtgaccacccccggcctgggccagtacatctccggcgccatcctctttg

SEQ ID NO: 3442 - DNA, 353 bp, Chlorella vulgaris
cgacccaagcgtacgcccacgcgtccggggccagctgaggacgcaggagccggcggagtttgtttagggaggatcaggcgcaagtcatggcagccctgcaagcacaacaggctcaactgccccgcagaataatcaaggaaacccagcgcttgctaagcgagccagtgcccggcatcagtgctgccccctccgaagacaacttgcgttattttaatgttatcatacttggtcctgcggactcgcccttccaagggggggtatacaagcttgagctcttcttgcctgaggactaccccatggccgctcccaaggttcggtttttgacgaagatttatcacccaaatgttgacaag

SEQ ID NO: 3443 - DNA, 370 bp, Chlorella vulgaris
cgacccacgcgtacgagttgaggaggttgagagggttgagcaggtggaggacgtcgaggatgacgtcagtgacgatgtcagtgacgacgaggagggagaggaaggcgaggagggcgagcgcaggggcaagcagagccgctctgagaagaagagcaggaaggctgtgcagaagctgggcatgaagcctgtgccaggcgtaatgcgcgtgcagatcaagaagagcaagaacatcctttttgttatcaacaagcctgatgtgtacaagagcccctcttctgacacctacgtcatctttggcgaggccaagattgaggaccttagcgcacaggcagcaggcgcagcggctgagcagttcaagatgggccaaccc

SEQ ID NO: 3444 - DNA, 366 bp, Chlorella vulgaris
gctcgacccacgcgtacggcgcatcggcagcgaccttttctatgagaagaaggtgactctggtggaggcgctgtgcggcgcgcacttcttcatctccacgctggacggccgccagctgcaggtgtcctcggagggccaggtcatcaagccggacagctggatgaagatccagggggagggcatgcccatccatgggcggccctacgagaagggcttcctgtacatccacttcacagttgagttcccggacttcgtggagcccgcgcagcgtgcggcgctgcagggcgcgctcggcccgctgcccaacggcgcagcccccatgggcgacgaggtggaggaggtgcagcttgcggcggtgaaggacat

SEQ ID NO: 3445 - DNA, 372 bp, Chlorella vulgaris
tcgacccaagcgtacggagctctttgccatgcactgggtggaggtgaagcgtggtctggacctgaaggaccccggcagccaggactttgaccccgtgttccagggcaacaagctcaagccccatgaggttggctaccccggcttcacaatctttgtgcccggcgacatggaggagctgaagctgaaggagattaagaacggccgcctggccatgcttgcctttgccggctttgtgatggcggcgcaggtgaccggcctcaacccgctggcagcgctggggcagcacctcgcagaccccatcaacaccaccatgttctccaaggccgtcgttgtgcccggccaggcgatcacccccggctgcgccaatccctc

SEQ ID NO: 3446 - DNA, 376 bp, Chlorella vulgaris
cgacccacgcgtacggtttagttaggtgcatcaaccatggggcgccgcccagcaaggtgctaccggcaaatcaaggggaagccgtaccccaagtctcgcttctgccgtggtgtgcctgactccaaaatccgcatctacgacgtgggcgcaaagaagtctggcgtcgatgccttcccttactgcgtccacatggtcagctgggagaaggagcacatctcctctgaggctcttgaggcggcccgcattgctgccaacaagtacatggtgaagaatgcgggcaaggacgcgttccacctccgcgtgcgcgtgcaccccttccacgtgctgcgcatcaacaagatgctttcgtgcgccggggctgataggctccaaaacg

SEQ ID NO: 3447 - DNA, 392 bp, Chlorella vulgaris
aattcccggctcgacccacgcgtacgcagcattccaagtacttctgcaccttctgcggcaagttctccatgaagcgccaggctgtcggcatttggcagtgcaaggcctgcaagaagacccttgctggtggcgcctacgtgtgcaacaccgccgccgccgtgactgtccgctccaccatccgccgtctccgcgagcagattgagaagtaagcagccaaacccagaaaggcagccgctacatcagcagcagcccaaccactagcccagcgtgcaggcgccgtggatgccagtattttggggcgccgaccatgacagccttgggacagcttgtgctttggcctgtgagctgtggaaggcaacagggggcggtcagccgcgggctgtgatgctgcc

SEQ ID NO: 3448 - DNA, 373 bp, Chlorella vulgaris
cggctcgacccacgcgtacgaggagatcaagaacggccgcctggctatgttctccatgttcggcttcttcatccaggcacttgtgaccggcaagtctcccctggagaacctggccgaccacctggctgaccccgcctccaacaacggcttctccatcctgaccgccaccaagttcaccccctgaattcagccctgaattttgagggaaatcccctggctgctgctagttcctcgttgttctagctcttggttggttgccggtgtgtcgctgttgtgtgaaggggagaggcgtgaccccttggttgtctactggcagcagcagcagcacccagcagctggacggtcgtattgagatgtgtgtgacgcggcaaaa

SEQ ID NO: 3449 - DNA, 467 bp, Chlorella vulgaris
  unsure (1)..(467): unsure at all n locations
ttttgtccaacctggatttggaataaaagcagcatgcacctggccagcattttaagaagacatgcacaacatatgcgactggcggcggccaacaacccacaagcggccagccagccaagacatcccccaggctggatctgggacgccccaagagtaataacccttgacaaggtgaggttgtagaatgctagactatgtttgaaccaaaggtgagagggtataacgttagaccgagtagggcgagatgcagcacagtcgacctaaccaggaggacgtcagcaaccagaccaaatatggcagccagcctcaaccatgagacacaatactagcaactagcaagcgctgtancagcggtgccctcgnggccacagggcattaacaaagtcgagcatccgccgcgcgcaccgagaccgttccgtgctgtgtggcagtagtgagcgcacagcatatcatcccaagagcatgct

SEQ ID NO: 3450 - DNA, 365 bp, Chlorella vulgaris
tcccggctcgacccacgcgtacggtacctgctgcggtgtgcgtgcagggagcagcggcggcgggatgcggagctgcgggagtttgacgacctgctgaagcggagggaggagttcaagcggggaggcggccccggcagggggctctgaccggagcatgcacagcatgactgtgcggccccgccccaacaggctggctttgatttctgctccagacacttttgtgtgttggtgggtgcgcccctgtgctgggcaaggctgcttctggggtgtcctttggctggcagccggtgaaggaccaacaggctcatctgaccttccggcttccagggagggaggggtgtggctgcaggccctgtcaccaaaaa

SEQ ID NO: 3451 - DNA, 369 bp, Chlorella vulgaris
ggctcgacccacgcgtacgcccacgcgtccgcggacgcgtgggcgcgcctccgtggagtggtacggccccgaccgcgccaagttcctgggccccttcaccaaccccccttcctacctgaagggtgagttcgctggcgactacggctgggacacctctggcctgtccgccgatcccgagaccttctcccgctacagggaggttgaggtgatccatgcccggtgggccatgcttggcgcccttggctgcgtcgtgcccgagctgctggaccgcaacggcaccgtcaactttggcgagaacgccgtgtggttcaaggccggtgccgccatcttcggcgatgacgggctgaactacctggggaacccctccct

SEQ ID NO: 3452 - DNA, 422 bp, Chlorella vulgaris
cggctcgacccaagcgtacggaacaactgccttctttcagtttggtcaccatgacctagcttgtgtgttgggcgtttcgtccacgagtacactgtgcggcgtcgcgggcatggcttctaccggaggtcctgtggacttgacaacctgagcttccatggctgtcggcgctcttatggggcctgtgtgcttccgtatattgcgttggagctccgccttggtccgctttgcgaacatgtaggcgtcctcggagcagtctgaagctgagggagaaggtgccgaacctgagcagtgtgtgctgccatcttgcatccggggttcttgttgagctctacaaatctgccttgtttggttttcttgccttggacgtctcctttgtgcatccttgccgggcggcttgtgaccaaaccaatttaatttttggt

SEQ ID NO: 3453 - DNA, 415 bp, Chlorella vulgaris
  unsure (1)..(415): unsure at all n locations
ccgggtcgacccacgcgtacgcccacgcgtccgcccacgcgtccgcgagtaccgccaccatggtgctcaagtccgccctcctcgcctgcctggtgctcatgactgggctggcctgtgcccagcatgatgctgacggttccctggggcgcaagatgttggctgtcgctcagtccacagccaccgccaaagcagccaacggtggagtggccaacgccaatgccaactctgttgccaccggcaatggtgttgctctgtccaatgccaatgccaacgctgtgggccccggtgccattgccaactctcaggccaacgccgctgcgctgggccacggccttgccactgccaactcccaggccaacgccgccaccctgngtggtggcattgcagctgctaacgcccaggccaacgcactgac

SEQ ID NO: 3454 - DNA, 339 bp, Chlorella vulgaris
aggtaacggttgggaattcccggctcgacccacgcgtacgcccacgcgtccgttttttactgatgttttccttcttggatacatattttatagtacagatgtatgagaggcactagaggaatgtttgtggcctctgagctggcagaccgcactatgaaggaaggtcgtacagtgaaaaaaaaaaaaaaaaaaaaaaaaaaaaaaaaaaaaaaaaaaaaaaaaaaaaaaaaaaaaaaaaaaaaaaaaaaaaaaaaaaaaaaaaaaaaaaaaaaaaaaaaaaataaaaaaaaaaaaaaaaaaacaaaaacaaaaaaaaaacaaaaaaaaaaaaaaggaaaa

SEQ ID NO: 3455 - DNA, 375 bp, Chlorella vulgaris
cgacccacgcgtacggtgcttgctacgggcagacaccacccaccaaggatggcctccaccatgacctgcagcgccctgcacgcctcggttgccaggagggctgccccgggccgccgcggtgccgtgaaggtccaggccgcgggcaagcagatcccccattggctgcccggcaccccccgcaaggactacctggatgccgctgacctgccacgcaacttctcctttgaccccctcaacctggccaccaaccccactgcgctcacctggttccaacatgcggagctgcaaaacgggcgctgggccatgctgggtgttgccggcatgctgaccccggagctgggtgccaagctgggcggcttcacaggccccaccggc

SEQ ID NO: 3456 - DNA, 386 bp, Chlorella vulgaris
ggtaacggtagggaattcccggctcgacccacgcgtacgttggaacgctgcacgtttgagcttttcagcagtaaagagcgatatctgcatcccatagttggcttgccatggcagcaatgcaggtgttcaagacgagcagtctctctgtgcaactaagcctgacgcggtccttgcaccgtttgcacctactgcctgcgccccagcacagccttggggtcaggctcacagcgcagcgcttggaagctcgcagtgctgcacgactggttgttgcagcggcagagaccgaggctgcgtcagctgcccctgccgctgccgctgagctgccagacgtaagcaaggttgacatccgtgtgggcaagattttgaagtgtgaggcgcaccccgat

SEQ ID NO: 3457 - DNA, 401 bp, Chlorella vulgaris
gaattcccggctcgacccacgcgtacggggtctttcaccatggtgacgcctctcatcaaggtgaagagcgtcaagaagcgcactaagcgcttcaagcgtcaccagagcgaccgtaagatctccgtcaaggagagctggaggcgccccaagggtattgactcgcgggtgcgcaggaagttcaagggatgcggcgtgaatatgcctaacatcggctatggcaccaacaagaagaccaggcacctcctgcccaacggcttctacaagtttgttgtgagcaacgtgaaggacctggagctgctgatgatgcacaaccgcaagtactgcgccgagatcgcgcacaacgtgtccaccctcaagcgcaaggcgattgtggagcgcgccggggagctgaatgtcaagct

SEQ ID NO: 3458 - DNA, 542 bp, Chlorella vulgaris
  unsure (1)..(542): unsure at all n locations
gggtcatccacgcgtccggcacgcgtccggacaccgacagcgccaagttcctgggccccttcaccaaccccccttcctacctgaagggtgagttcgctggcgactacggctgggacacctctggcctgtccgccgatcccgagaccttctcccgctacagggaggttgaggtgatccatgcccggtgggccatgcttggcgcccttggctgcgtcgtgcccgagctgctggaccgcaacggcaccgtcaactttggcgagaacgccgtgtggttcaaggccggtgccgccatcttcggcgatgacgggctgaactacctgggcaacccctccctcatccacgcacagtccatcgtggccgtgctgctctcccacattgtgctcatgggcctggttgagggctaccgcgtgaacggcggccccgctggcgagggccttgacgccctgtancccggcgaggcctttgacgccctgggcctggccgacgaccccgacagcttcgctgagctcaaggtcaaggagataagaacggccgcctggcca

SEQ ID NO: 3459 - DNA, 309 bp, Chlorella vulgaris
ccggctcgacccacgcgtacgcccacgcgtccggtaatccgcgtcacgcaatggttccagggaactcactagccaggcaaccatgatgaacaccttcggcgccagcttgcccaaggctgtgcccacccagagcaagggcacccgccaggtgacccgcgcctccgtggagtggtacggccctgacagggccaagttcctgggccccttcgctgacggctccacccacagctacctgaagggcgacttcgccggcaacaagagctgggacactgctggtctgtctgccgatctccagaccttcgctgccta

SEQ ID NO: 3460 - DNA, 387 bp, Chlorella vulgaris
ctcgacccacgcgtacgcccacgcgtccgggatggcgttcaaggtgcaggctttccgcggtgtgtccaccatgcgagctccatcacccactcgggtcaccatgactcgcacaagctttgccaggctttacatccgcacacagcgtccggccaacttgcagtctgatttcctatcacctgtggcagcaatcacggggctctgctcctccttctcacaacttgtgctggagccagtgcgtcaggcgtgccggtcccttggcatgccactgatagatgccaacatgattaagggaaaggggtgcacactggaaggcagccgcaggaagcgcgctcgtgtatccggctttcgcacccgcatggagactgtcagtagccgtaaggttctggc

SEQ ID NO: 3461 - DNA, 382 bp, Chlorella vulgaris
aattcccggctcgacccacgcgtacgcccacgcgtccgctcctggatctcaaccgtgctggcagcagctcccgcacgacctctcacccaccagtcctagcgaggttagcaggggttcaccatgaaccaggcaatctatgtctctctgtctctcattggcctggtggccattgtgggagctggtgttggtgttggtagcggcgtggcactgatcagccagcagccgcaggcgaagactgagccaaccaagcactgagtggttagttgctgtggcatacagcagcggcagcagcagcagcagctagtgctggctagcttggggaagttgcagcttttgcaaaggtgcctggccgtgtgcctacctgacggcccgggtttgggaa

SEQ ID NO: 3462 - DNA, 366 bp, Chlorella vulgaris
gctcgacccacgcgtacgggcaagatggcgcggggcccaaagaaacatctgaagagattgaatgccccgaagcactggatgctcgacaagcttgggggcatctttgcccccaagccgagcgcgggcccccacaagacccgggagtgcttgccgctcatcctgctgctgaggaacaggctcaagtacgctctgacgggcaaggaggtgacgagcatcctcatgcaacgcctggtagaggttgaccgcaaggtgcgcactgacaagacctaccccgtgggcttcatggacgtggtcaccatccccaagaccgacgaacacttccgcctggtctacgactgcaagggccgctttgtggtgcaccgcatc

SEQ ID NO: 3463 - DNA, 368 bp, Chlorella vulgaris
gagttcccggctcgacccacgcgtacggcaccccgcagccctgttgttgcgtgtgcttgccacctgcagacaccacccagcaacgatggcctccaccatgacctgcaccgccctgcgcgcctcggttgccaggagggctgccccggcccgccgcggtgccgtgaaggtccaggccgcggccaagcagatcccccactggctgcccggcaccccccgcaaggactacctggatgccgctgacctgccaggcaacttctcctttgacgccctcaacctggccaccaaccccagtgcgctcagcgggttccaacagggggggctggagaacgggcgctgggccatgctgggtgttgccggcatgcctgacc

SEQ ID NO: 3464 - DNA, 359 bp, Chlorella vulgaris
gacccacgcgtacggatttccaaaagctggacggttttccgtgtcgctggggtaaggaggcggtcgctatggctgccgcactgggccagagagtgcagctgcaccgctccagcataattgggaccaagcttgttagcgcaaatccccatcggggtcgcagctccatgcacgttccatagtgcagggcgggcgcatcagccccggcaaggaatgggagcattatgagctcacaaaaaacttcatgccggtgcggatacccatgcacgtcaagtcaggcaataccgtgcacgtgattgccggcactgacaagggggttgtgggcaagattaccaaggtcagtagcaagaacgggactgtgc

SEQ ID NO: 3465 - DNA, 315 bp, Chlorella vulgaris
aatgtctaagtacgctatgttgcagcttgtcaaccagacacttgtgttcattaagaaagaaatgggcggccgccctaaagaatcaagcctaaggtacccttaaatgcaacttcacaatcctgcaagctggccacttaaattcaattcacgggccgtcattttacaagttcttcacgggaaaaaccctagttttaccaaacttaaccaccttgcagaaaatccccctttccccacctggtgtattacgaaacaggcccgcacctatcgccattccaaaaatttgcgcagcttaaatgccaaatggaacccccctgg

SEQ ID NO: 3466 - DNA, 376 bp, Chlorella vulgaris
  unsure (1)..(376): unsure at all n locations
cacgcgtccgggccggtggtgctccttcgctacttcaacccagtgggggctcatccctcaggccgcatcggtgagcaccaggtgatgctgaacaacctgatgccctgngtgcaagccgtggctctggggcaccagaaggtgctcaatgtgtacggcagcgactacgacacgcgcgatggcacctgtgtgcgcgactacatccatgtcatggacctggcggatggccatgttgccgcgctgcgcaagctggaggccacacctgagctgggttgcgtcccttacaacctgggcaccggcacaggcaccaccgtgctggagatggtgcacgcctttgaggcggccagcgggctcaaggtgaacagcaacatcacggaca

SEQ ID NO: 3467 - DNA, 260 bp, Chlorella vulgaris
ttcccgggccgacccacacgtccacggacacgtgggttgcacctaggagcgtggtggcgtggggtgtgtgaatgtcaactgcaggcttgctcccttccctgtgtggctcgacggggcgtaagttgcgtgcgccttagtcggggagcagcggagcaaggcggcccagttcaggtgcctctcggggactggcagcggttgggactctctggacgtagtggggcctctgttgttataaagatagggcttgcgggcgctttgaa

SEQ ID NO: 3468 - DNA, 208 bp, Chlorella vulgaris
gacccaagcgtcaaccagtcagcaaatggcatgtaccagcaaaatggcgtgaaggggtcgtcaaggactgctacagagtctgaggaggatggggagggcgatgcggatggtgccaaaaaggcgcccgcgcgggtgacgggtgggggaggctcatcctctgcggtggacgaggtgccgagcccacctgtgggcagctctggaggtgcta

SEQ ID NO: 3469 - DNA, 307 bp, Chlorella vulgaris
gtcaggaattcccgggccgacccacgcgtccagcacaagacccgcataggggcctggtatgaccacatgatgggggcggttggggagtctgcgcggcttcagtgacgaaggaaaggaggcattgcggtgggggcaatgatgcaaggttggggggaacagtgggacagcagttgcactgttactgtcacagctcaggtagcgaggggccggcgtgaccattgccaggaggagaggtgcatatatgtggcggtgccaaggcccatgccatgaggagtaccgtgcggggggcattgttgctggcctccgc

SEQ ID NO: 3470 - DNA, 452 bp, Chlorella vulgaris
ggtctaggattcccgggccgacccacgcgtcaagtttttcgaagtgatcatgacgggcgtcaagcctcagcttcagtacttccctgttcgtggcaggggcgagcccatcaagctcaacttggcggctgcaaacgtggagtgggagtttgtggacctaacttgcgacaagggacctgccgtgataaaggacttggaagccttcccctttggccaagcgcccaggtacattgatgacagcgtcgacatggtgcagtccaacgccatttgtcgccacctgggacgcaagcacggcatgtatggcgccaacctggccgaggctgccaagatcgaccagattcttgatggcgtggaggaccagcgcagcaaatacctggggcttatctacaaggatgagctggctgatggttccaagaaggcctattttgaggtccacgtggaccccgcctccgccc

SEQ ID NO: 3471 - DNA, 238 bp, Chlorella vulgaris
ggtctagaattaccgggccgacgcacgcgtccacggacacgtggcgccgcactatcgtctcacgcctcacgtgtcctcgtggctagccgctggacaagctgatcatgcaggccgttaccatgacgatgaccacggcagtggtggccggacgcacgcccaccggaggccggacctcagggttccccggacgcaagatcggagctttgaggctacgtactttcggccgcaccgtaaaggc

SEQ ID NO: 3472 - DNA, 129 bp, Chlorella vulgaris
gacccaagcgtcaagcgactggtccgccgacgcgtcggcccacgctgtccggctggcgatgcgtggttggcaccatggctgagaagtcatgcacgatcagcgcgccagagttcatgaccaacgaggggg

SEQ ID NO: 3473 - DNA, 115 bp, Chlorella vulgaris
gacccaagcgtcaatgacccgcgacgcaatggcagcccaggcagtgctcggcacgcgctgccgggccaggcctagccaggcccgcgtggctcgccgtgccggcgtggaggtgcac

SEQ ID NO: 3474 - DNA, 83 bp, Chlorella vulgaris
gacccaaacgtcaatcccacttgagaacctgctgtaccacctggaggacccctcgaactacctctgtgccctttccgccaccc

SEQ ID NO: 3475 - DNA, 328 bp, Chlorella vulgaris
ggtctagggttcccgggccgacccacgcgtccacccacgcgtccgcccacgcgtccgcccacgcgtccgcccacgcgtccggtcccgtcaattttatgatggggagggcatatattactcttcttgtcgctctgttttctagccttcttggtagttgtgtcctctacctcgggctctcatagccgaagaggggtgagtggaactgttgccgccgagtgaagttttggcgatgtatgccctgcttcttagacaggtgtgaggttgctagggacgataataagctgggcgttccgctgagctggagcaagaggcaagggcttcgatggtg

SEQ ID NO: 3476 - DNA, 115 bp, Chlorella vulgaris
  unsure (1)..(115): unsure at all n locations
gacccaaacgtctacgcctcgagncggaactgccgcaaggcacacgtcgcggtcggcttcagggtccgcaggtcgcttatgagcgctcccctctccggcgaagtgcgcaacaagc

SEQ ID NO: 3477 - DNA, 227 bp, Chlorella vulgaris
gacccacagcgtccacccacgcgtccgggcttttggcttgttcccctgcccaccaacacgctgatccgcaaggaactgccctccaggtgcactggccctccattgttctaaaggtgaatcccccataccggtgctttgtgccacttggctcactgtctgatgggatacggcccttttgtaaatgatggcatcaaaacacaataacaatacacgtcctctcaaccaac

SEQ ID NO: 3478 - DNA, 246 bp, Chlorella vulgaris
ccggtaccggtccgcaatcccagtccgacccacgcgtccacccacgcttcctctcacccgtaggccgccgcgtggggttcagtgtgctagctgggcagaccatagctggcagtgtacgggggtacccgcctggttatttcacgggcacatcccaggctgtcgccctccatcggcaaccgttctccacctgcgactcctcactcccggggccacacacgccactatccagtacttcacccgtcaaac

SEQ ID NO: 3479 - DNA, 133 bp, Chlorella vulgaris
gacccaagcgtcagcgggccgtatcgccaccggccgcaaggtccagatcgggggggccagctaggtgcccggccagaagaaggaccggtacgtgaagaccgtgcatggcaccgtgctgtgcgcgggcgggggc

SEQ ID NO: 3480 - DNA, 124 bp, Chlorella vulgaris
gggccgacccacacgtccacgctccacgactgcgtgcgcagcgcgacggcggtgctctcgggccgcgggatcttccccgaccgcatgcgggcggggctgtcagtggcgatgcttgccaccgacc

SEQ ID NO: 3481 - DNA, 254 bp, Chlorella vulgaris
gcgtccacacaggagtactggtagtaagtatgttacctaagtacctttcgcagatggttggcgtgacatgcgccggtggtcaatactctccttccctgacgatgttgtttatgagttgatgtggctgccgtgccaatgagtttctggacatgcagtgtgctccattgccttactccttctgggttctgcgtaggggacgtctgctgttgcactagcgccggtatcggtggtcccttttccagtgtctcttaccc

SEQ ID NO: 3482 - DNA, 259 bp, Chlorella vulgaris
tcccgggccgacccacacgtctacgcacgcgtccgcttgtcctcgccgccaggaggcctcttcgggtcgtgcctgactatcccacttaggacaagatgccgcctaagtgtcggagctctcaggaggagaatgtcaccctgggccctgccaccagtcagggtgagctggtgtggggtgtgtgccacatcgtcgcgtccttcaatgacacctttgtgcacgtgactgacgtgtcgggcaagggggcgctggtgcgcgtgac

SEQ ID NO: 3483 - DNA, 260 bp, Chlorella vulgaris
tcccgggccgacccacgcgtccacgaggagtgtgcaggcagaggcacacacacctggcaggtctgccccgcctgcgccgcctagcagttctcccgcagccagggcgcttgctgtgcgtggctccacggtttgggcagctgcacgggcagctgttgatgccgtctctgttgatgtccttgcgctgccgggggaggtggcagcagacgtgggtgtggccgcggtgctggcgagacgcgtgcgggcggcagccctaggtcctg

SEQ ID NO: 3484 - DNA, 425 bp, Chlorella vulgaris
cgtccaaagcaaatctttctgcaccatggcgtttgcgatgaagtctcaggtcagcgtgcagaaggcttccttcgcgaagccggccctcaaggcctcctgctccaagcgggtggcagtggctcgccccgtgagctgctctgctcagaatgagaaggccaccgccgtggctgccgccgctctggccgttgcccttggctttggccaggttgacgctgcctatgccgacgttgcaggcctgaccccatgcgcggagagcaaggccttcgccaagcgcgagaagaatgaggtcaagctgctgacaaagcgcttgaagcagtatgaggccgactctgcgcccgccctggccctccaagccaccattgacaaaacccatgcccgctttgagaagtacgccaagcaaggcctgctgtgccgcactgacggcc

SEQ ID NO: 3485 - DNA, 313 bp, Chlorella vulgaris
acgcgtccacgacagattcgctgagctcaaggtcaaggagatcaagaacggccgcctggccatggtgtccatgcttggctttggcgtgcagggcctgctcaccggcaagggccccctggagaacctggctgaccacctggctgaccccaccgtgaacaacggctttgccgtggccaccaagttcacccccggcaactgagctggttgtcttgacggacgtttggctgtgctgcttgacaggctggaggtcagcattactatgctggccttgtcttgagaagaaaatccttgtgtaactagctaaccatcaaaa

SEQ ID NO: 3486 - DNA, 77 bp, Chlorella vulgaris
ccccaaaaggataaagccttaactacccatgcatgcaaagtaaaaagctctccaaaagtgtaacctaaaattcaatt

SEQ ID NO: 3487 - DNA, 394 bp, Chlorella vulgaris
  unsure (1)..(394): unsure at all n locations
ggtctaggattcccgggtcgacccacacgnnaaaannnncgtccggggagtagcggcacccgtgccctatacagcttgtggagtgggctaatgagcggatgctcgacaatgcttgtggggcatctttgcccccaagccgagcgctggcccccacaagacccgggagtgcttgccgctcatcctgctgctgaggaacaggctcaagtacgctctgacgggcaaggaggtgacgagcatcctcatgcagcgcctggtagaggttgaccgcaaggtgcgcactgacaagacctaccccgtgggcttcatggacgtggtcatcatccccaagaacgaccagcacttccgcctggtctacgactgcaaaggccgctttgtggtgcaccgcatcagcaag

SEQ ID NO: 3488 - DNA, 114 bp, Chlorella vulgaris
cccacgcgtccgcggacgcgtgggaaaaaaaaaaaaaaaaaaaaaaaaaaaaaaaaaaaaaaaaaaaaaaaaaaaaaaaaaaaaaaaaaaaaaggaagcaacacaaaaggttaa

SEQ ID NO: 3489 - DNA, 421 bp, Chlorella vulgaris
  unsure (1)..(421): unsure at all n locations
aggtacaggtacggaattcccgggtcgacgcatccgcccaggcgtccgcaggtactgagagtgccaccaaagccgccagaatgcagaccaccttcgtgggcaccacccaggcgctgcgcgccaaggtctccacccaggccactcgtggctccaaggtagcaacctccatgcgccgcaccgtcaagtccaagaacgtgaagaccaccgacaccagccagtggtacggtcccgaccgccccaagttcctgggccccttctccgagggtgctgtgccttcctacctgaacggcgagttcgctggtgactacggctgggacaccgccggcctgtccgccgaccccgagaccttcaagcgctaccgccagattgaggtcatccatgcncgctgggccatgcttggcgccctgggctgcatcttgcc

SEQ ID NO: 3490 - DNA, 352 bp, Chlorella vulgaris
ggcttcttgaggcgtagaacgtcaagatgccgtcccagaaggcttttgccatcaagaagaagctggccaagaaggccaagcagaacaggcctatcccgccctggatccgcttcaggaccaataacaagatcaggtggaacgccaagcgcaggcactggcggaggaccaagctgggcatctaaacggccagcattctcgctttcttgtcggcattgcagcttgggagtgcagacgcctggcctggccgacctttattgttgcggcagcgcagcagcctggcggaaggcagtagcaaccgcagctggggggcagcctcctggcccatgcagtaatgtaacaacctacgctaaaa

SEQ ID NO: 3491 - DNA, 336 bp, Chlorella vulgaris
ctggggtgttccttagttacggtggggatatgcgggtgcggcgaatcccttgttggaagcggtttcgctgtgttgcgctgctcttggcatgcgtcgcggttgcggagtagcagccgcgctgtcaagcatgctgatcctggttggtggagtggacgttgctgatttgatgtacctcacctgaggcgtgtacatgctgcgcacgctgcgcctgtgccgcgtgcgctggctcggtgctctgcagcctgcagattttactggcatcggcgatttaatgtagcaacagtcacttgttgagtgtggtgacgtggggtgtgtaacatgcttccaacgacaaaa

SEQ ID NO: 3492 - DNA, 420 bp, Chlorella vulgaris
cccacgcgtccgtaccgttcctaggagaccttgatccacaccactaagcacaatgtcaggcctgctagcagccctccctcaggccgacatgggcctcctagcatctgctgcggttgtctatggagttggacggctggtacccacatacgatatgggttggtacaaggcgctcagaaagccctcctggaacccgcccaactgggtgttccccgcgtgagtggtatccagcagtatgcttgaacttgtggttatgtcttgctagcgttgtctgttgctgcaagtggctcttctgcttgtgatagcaagccgtatgtgcacaaaatcttttattgtcttttacacatggcgctgcagcgtatggttaccattaaaattgttgcaatcagtggcgctatggctcgtctgcaagaccgcgccaga

SEQ ID NO: 3493 - DNA, 302 bp, Chlorella vulgaris
aattcccggctcgacccacgcgtacggccattatcggcatttggtactggggtacatatttgactccgccccggggttcatggatgtgaatgcggctacgctggtgctgattaccactatgtcaccggggctgaagcgtactgcagctttggctgcccatattgtgacgtccttcttccagcccataattgaatcacgggggaaggactattgcgacaacatgctgcggctggggcaggataagcctcagcagtcgcctctataccgatgacgcaccgctgtgccacgcagacaggcttact

SEQ ID NO: 3494 - DNA, 406 bp, Chlorella vulgaris
cacggatccttgatcgtgctatcatgggtgtccaagtgcagactgtcactcctggcgatggggtcaacttccccaagaaggggcaaaaagtaacagtccactacacaggaacccttacaaatggcaagaagtttgactcctcccgggatcgcggccagccctttgatttcaccatcggtgtggggcaggtcatccggggctgggacgagggcgtggctcagatgagtgttggccagcgtgccaacctgctgatctccgccgactatggctatggggcccggggtgctggaggtgtgatcccgcccaacgctgatcttcagttcgacgtggagcttatcaagatcacctgagcaatgccagagcaatgcaccccattggctcacagctagtgctgcaagagccgaca

SEQ ID NO: 3495 - DNA, 387 bp, Chlorella vulgaris
ttcccgggtcgacccatgcgtccgtcgacgccttggggaaaaccgacattgatctttcaaggattcaacactgaccttgggttgaaaccatgaaacagggaaccccacgggaatggggagctcccccaggagcaacaacagcaattgatgcaggcgcatcgagtccatgcaggttagggatagccttagaatgtacaatagccttgtagagcgatgtttcaaagactgcatcgaaaacttccggcggaaggacctggatgctgcagaggagaagtgtgtcactcggtgctgtgagaagttcatgaagcacagcgctcgagtcgggacacgctttggagagctttcagcagcagcggagcagcagatggctagtctcatggcgcagca

SEQ ID NO: 3496 - DNA, 340 bp, Chlorella vulgaris
agcccaagtgctcgtccttctcgcttgaagggctcccaagcaagccctgtggttaaagcgaacctatcaacatgggtcacaacgacgtgtggaactcccaccccaaggagtacggcaagggctctcgccgctgccgcgtgtgctccaaccagggcggtctgatccgcaagtatggcatgaacatctgccgccagtgcttccgcgagtacgctggcgccatcggctttgtgaagtaccgctaggcgggctgacgtaccgcagcctcagcggccctgctatatgatgagtgtgcctggctccggctggatgtaacacacagatattgaaaaaaacaccctgt

SEQ ID NO: 3497 - DNA, 387 bp, Chlorella vulgaris
cacggaggcctctctgggacgggttgagctgtggcaagcatgttcacggctcgcaaaaagattgtgaaggagcggggtgtggagcccgatgagctcgaggagcaggtcgctcaggcgctctttgacctggaggccaccaatgccgagctgaagggcgacctgcgcgacctgtacattgccgctgcgcgcgaggtggacgtctccgcctctcgcaaggccatcctcatccacgtgccctaccgcctgctcaagaacttccacaagatccagcagcgcctggtgcgcgagctggagaagaagttctccggcaaggacgttgtgattgtgggcgtgcgccgcatcctgccaccccccaagcacagccgccgggtgcagcgcccgcgcagc

SEQ ID NO: 3498 - DNA, 66 bp, Chlorella vulgaris
aaaaaaaaaaaaaaaaaaaaaaaaaaaaaaaaaacaaaaaaaaaaaaaaaaaagaaaaaaaaaaaa

SEQ ID NO: 3499 - DNA, 295 bp, Chlorella vulgaris
gcaagcccacctgtggaacagcgcctctgtagccatccacatgcacggcgcctctcttggcaactgggccttcctcccgcacaaggcggtgggggtgcatgtgacgcttgaccgcatcggcaatgcgtttgcgcatcactttcgccaccacacatgcaggagcaggacttgaaggaggtgaccaacatctcggcagtgctggtggatgttaagttccacccgaacgttgtgctgcggatacggcagtttgaaaagtcgatggagaaaaaacaaaatggaaaaaatagagaaaacc

SEQ ID NO: 3500 - DNA, 228 bp, Chlorella vulgaris
tgcaaacctttggtgtctgtgccccatggccttcaagtgtgcaagttgctgtgtgcacccacggttgagcgcttgcgccttacgactcgaacattccctgctccttcgtcaagtcatatacaaccctttctttgcttttcacgccctttctgtttcaagcgctatgcttgaggtccgggtttgacgctatacacggacacaagttgtaacttgttttggccaaaaagt

SEQ ID NO: 3501 - DNA, 212 bp, Chlorella vulgaris
tctggaattcccgggccgacccacgcgtccatgcatacattcgtcttcggctcaagtataggatgcaggccgccatgtcccagagggcttttgtcgccgcacatcgcgtgcgcgctgcccccggggccacgcgcgcagggaggtgcgctgtggtggtgcgcgcctccgcggaggagtcgcgcggcgcagtggtgggcgggctgctggccggt

SEQ ID NO: 3502 - DNA, 69 bp, Chlorella vulgaris
aaaaaaaaaaaaaaaaaaaaaaaaaaaaaaaaaaaaaaaaaaaaaaaaaaaaaaaaaaaaaaaaaaaaa

SEQ ID NO: 3503 - DNA, 110 bp, Chlorella vulgaris
aaaaaaaataagaaaaaaaaaaaagggcggaagcacaagaaagataaaaacttaaataaacatgaaagaaaaaataagaactcttcaaaaatagtaacaaaaattcaatt

SEQ ID NO: 3504 - DNA, 412 bp, Chlorella vulgaris
aagcttgttgctggcgtcggagcggctggcaacatggcgaccgagattaagttgttcggcaagtggagcttcgatgaggtggaggtgaacgacatctcccttgaggactacattgccgtgaagcccaagtatgcgcgcttcaccccccactctgccggccgtttccagaagcgccgcttcaggaaggcgcagtgccccattgtcgagaggctgaccaactctctgatgatgcacgggcgcaacaacggcaagaagctgatggcggtacgcatcgtcaagcacacctttgacatcatcaacctgctcaccgaccagaaccccatccaggtcctggtggacgccatcatcaacggtggtccgcgtgaggatgccacccgcattggctccgcccgtgttgtgcccccccaagctg

SEQ ID NO: 3505 - DNA, 374 bp, Chlorella vulgaris
cgggccgacccacgcgtccactcggacactattgagaatgtgaaggccaagattcaggacaaggagggcatcccgcctgaccagcagcgcctgatctttgccggcaagcagctggaggacgggcgcaccctggccgactacaacatccagaaggagtctaccctgcatctggtgctgcgcctgcgcggtggcatgcagatttttgtgaagaccttgactggcaagaccatcacgcttgaggtggagtcttcagacaccatcgagaatgtgaaggccaagatccaggacaaggagggcattccccctgaccagcagcgcctgatttttgcgggcaagcagctggaggatggtcgcaccctggctgattacaacat

SEQ ID NO: 3506 - DNA, 359 bp, Chlorella vulgaris
ggtacaggtctagaattcccgggccgacccacgcgtccaccctcgggaactgcgtcgtcaagatgctggccttgtcttgagaagaaaatccttgtgtaactagctaagcatcaaaagaaaaaaaaaaagaagaaaaaaaaaaaaaaaaaaaaaaaaaaaaaaaaaaaagaaaaaaaaaaaaaaaaaaaaaaaaaaaaaaaaaaaaaaaaaaaaaaaaaaaaaaaaaggggggcgggcgaaaaggatcaaaactcatgaagcggagcaggaaaagaaaaacctctatgtgaggaggcccaaatatagaataaagggggcatagtttaaaaagagcaggccgggaaaactccgggggatac

SEQ ID NO: 3507 - DNA, 430 bp, Chlorella vulgaris
gtcgagccacgcgtccgcccacgcgtccgcccacgcgtccgcgatgacagcgccgagggcgtgaccaagaccaagaatgccgtggaggtcctgaagaagattggtgcctacactgatgtggagaaggccaaggactcgaagaacctgcgccgcggcaagggcaagatgaggaaccggcgctacgtgcagcgcaagggccccctgctggtctatggcaacgactctggtgtggcgcgcgccttccgcaaccttcccggcgtggaggtgcctccgtggaccgcctcaacctgctgcagctggcgccaggcggccacgttcgcagcttctgcatctggaccaaatccgccttcgagaagctggacgccatcttcggcaccaccgaggaggcttcccaggtgaagaagggcttcaagctgccgcgccccatcat

SEQ ID NO: 3508 - DNA, 467 bp, Chlorella vulgaris
acgccttggcgtagccgtccggaattctagggtcgaccgagccgtccgcccacgcgaccgcccacgcgtccgcccacgcgtccggtttgttggggtttggccggctgctgcatgcactgggcatctactattcccaccatgcttgcctgccagctcccggcccttatcaagcctccttgtggcagcagcagcagcacccccaacttttgtagtgcggagacgtgcgtgtgtgtgtgttatggggcggggggccgtaggttggggcgcccaccacgggctgcgccacatgtgttgctgccttctgttcttggtccctggctagtggcctcgcgacggatgcttctagtgtcctgctagcaccgcatgcacttactatcttgtccattacattgtagcattgtgcttttccagcgcaccttgctgtacctgtcccagtgtcctcgctcagtggcagcgtagagagtttg

SEQ ID NO: 3509 - DNA, 470 bp, Chlorella vulgaris
gtaggcgtccggaattcaagggtcgacccaggcgtccgcccacgcgaccgcccacgcgtccggcacctaacacacgcaccaggcaccatgctcatctccaagaagaacaggcgtgaggtgtacaagttcctcttcaaggagggtgtgctgtacgcggagaaggacttcaacctgccggagcaccccgagattgagggggtgtccaacctggaggtcatcaagctgatgcagtccatgaagagcaaggacttggtcagcgagcgctatgcctggcgccactactactggttcctgacggacgcgggcatcgagcacctgcgtgagtacctgaacttgcccagcgagattgtgcccgccacactgaagaaatcgaccaggcctctggagcgggagggcgcacgcccgccgcgcggcgacaggccgccccgccgctttcacggcgagggcccgcgcggctacggctctgccga

SEQ ID NO: 3510 - DNA, 386 bp, Chlorella vulgaris
ggtccagaaatcccgggtctgaccacgcgtccgaccacgcgtccggggattcggcaaggaagcaagatgccgatccatggcgggcacaagtaccaccagtatcaggtggtgggacatcaccttcccacggatagggagccggagcctaccgtgtaccgcatgaagctctgggccagcgaccctgtcagggccaagagcaagttctggtacttcctgaggaagctgctccgggtcaagaaggccaatggccagatcctgacatgcaacgagatctttgagaagcaccctaccacggtgaagaactacggcatctgggtgcggtaccagtcgcggactgggtaccacaattccttcaaggagtaccgcgacatcacgctcaacggcgc

SEQ ID NO: 3511 - DNA, 417 bp, Chlorella vulgaris
cccacgcgtccgcccacgcgtccgcccacgcgtccgaggcagtgcatctgctgaggaccgaaacggacaaccatgcagattttctgcaaaacagacaggactcatgtccttgagcttagctccgaggccactgtggccgatgtcaaggctgccatcgaggccagccagggcatcccctgcgatgcgcagcgtgtgatgttctctggtcgccagctggaggaggaggcctccctggccgcctgcggcgtgtctgacgacagccagctgtacatcctgatgcgcctgctgggtggtgccaagaagcgcaagaagaagacctacaccaagcccaagaagcagaagcacaagcacaagaagatcaagctcagggtgctcaagttctacaaggtagacgacagcggcaaggtgcagcgcctg

SEQ ID NO: 3512 - DNA, 223 bp, Chlorella vulgaris
  unsure (1)..(223): unsure at all n locations
ggttaaactgcttcggttanggaactgaaggtcgccggttcgattcctgccgccccggacttaaagccggccactttaggtcaaccctgtacttcgtacttggctccaaagggggagtttgcgaccctagttgttaactagagatgttgtgcctctagttggttctcctccacctatctacagcgtctcgcttcaaaagtcgccgtgggacaggtttccaaaa

SEQ ID NO: 3513 - DNA, 443 bp, Chlorella vulgaris
cggtcaagaattcccgggtcgaccacgcgtccggttttgggcggtccgtcgccaagaatatcggcagacaccatggatactcacgtgaagctgggcatcgtgatgaaggtcaacggcaggactggaacccgtggtcaagtaagccagatgcgcgtgaattctccggatgaccagaagtgccggatcatgcgcaagatctaagggcccctgcgcaagggtgaaatcctggaggcgccatgagtctaagcacgaggctcgatcgcctccagtaataccggaggatctgggggcgctggcgcaagatgtgacccctgcgcgcctggaacaacagtatgtggaaggcatgcaccgtgtaacatcatcactggtacaagcgggatgggtgggcccctttgtgtgcaactgacaagtgttcagcatttgcacgcggcaacccagcagca

SEQ ID NO: 3514 - DNA, 478 bp, Chlorella vulgaris
ggtcaggaattcccgggtcgacccaggcgtccgcggacgcgtgggcgtggagttacctcccaaggagcaggaccaaccatggagctcacacagcgtgaggcggacgtgcagatgctgctggcggcatcgtgccacctggggaccaagaactgcactgcccagatggagcgctacgtgtaccgccgccgcagtgacggcatctatgtgttcaacctggcgcgcacctgggagaagctgcagctggcggcgcgcatcattgtcgccattgagaacccccaggacatcatcgccatctccgcccgcccatatggccagcgcgccgtgctcaagtttgcgcactactctggcgccaaggctaccgtgggccgccacacccccggtaccttcaccaaccagatccagaagggctttgaggagcctcgcctgctgatcaccactgacccgcgcaaccgacaccagtccatcaaggaggccgcct

SEQ ID NO: 3515 - DNA, 313 bp, Chlorella vulgaris
cccacgcgtccgcgacgtgcagtcaacggtggccatgcaaggcctccagggcttcaagctggcaacagacaaggcgatgaaggtcacctatgcgcggcagtagctttggcctgctatgccgccgctgcaacggggttggcctgctgccgccttgcacgcacagtggcagccttcgcacggctaacaacttgcattaggggttgcagccagcatgtacacagtgccgggggtgccggaaacaagtgagctacttcttgtaaaagggtcacctcacaaaaaaatgaaacatgtcaaagagcgggaagtaaggata

SEQ ID NO: 3516 - DNA, 422 bp, Chlorella vulgaris
ccacgcgtccgcccacgcgtccgcgccaagggagactcccggtaagtggagaactacgcctactgagctggcagagcaggcagagcatgccctggctgcccacccaagcccagcccagcacagcgtgcgctgtgcgtgccgaggcaccgccctcttggagcgctgcgccaccacacacatgcaggcttccagggtgcagccagccatcaggggcgacctatctcggccttgggcaagagactgtgcagtgggcagttaggcgtgtgggtagcctaaactacggcccatactttatagaaggcagtgacccacccccctcctgaccccggccatgcctgtgtgccccatggggtgcatgggcggattggggggttgggggcttgtctttgcgaaccaagtgctcagttttccccaccttaagg

SEQ ID NO: 3517 - DNA, 104 bp, Chlorella vulgaris
gtccgctaacgcgaccgcgccaagggagagtcgctgtaagtggagaagtacacctactgagctggcacagcatgcagactatgccgctggccgcgcacccaagc

SEQ ID NO: 3518 - DNA, 116 bp, Chlorella vulgaris
aaaaaacgtccgaaaacataaagagtaaaagatgggcggcggccccagaggatccaagctcaggtacacgtgcatgcgagctcttagcacttctagaatgtcacctagcttcattt

SEQ ID NO: 3519 - DNA, 222 bp, Chlorella vulgaris
gtggacccacgcgtccgcccacgcgtccacccacgcgtccgggcggaggtgcataacaagcaaggacctgttccaccttccgattcatgatcctacacagtgatacaaaagctccaatcactctgcatattgacacaagcgtcctgaacttcatcaacgactgctccaagcctgtgtacgacaacattatcgatattgcctccttcgaaaagttcctcattg

1. A substantially purified nucleic acid molecule comprising the nucleic acid sequence of SEQ ID NO: 9 or the complete complement thereof, wherein said nucleic acid molecule encodes an algal protein or fragment thereof.

2. The substantially purified nucleic acid molecule according to claim 1, wherein said algal protein or fragment thereof is a Chlorella vulgaris protein or fragment thereof.

3. (canceled)

4. A transformed cell having a nucleic acid molecule which comprises:
(A) an exogenous promoter region which functions in said cell to cause the production of a mRNA molecule; which is linked to
(B) a structural nucleic acid molecule, wherein said structural nucleic acid molecule comprises the nucleic acid sequence of SEQ ID NO: 9; which is linked to
(C) a 3′ non-translated sequence that functions in said cell to cause termination of transcription and addition of polyadenylated ribonucleotides to a 3′ end of said mRNA molecule.

5. The transformed cell according to claim 4, wherein said cell is selected from the group consisting of an algal cell, a plant cell, a mammalian cell, a bacterial cell, a fungal cell and an insect cell.

6. The transformed cell according to claim 4, wherein said cell is an algal cell.

7. The transformed cell according to claim 6, wherein said cell is a Chlorella vulgaris cell.

8. A substantially purified nucleic acid molecule comprising a nucleic acid sequence wherein said nucleic acid sequence:
(a) hybridizes under high-stringency conditions to a nucleic acid sequence of SEQ ID NO: 9 or the complete complement thereof, or
(b) shares 90% or greater identity with a nucleic acid sequence of SEQ ID NO: 9 or the complete complement thereof.

9. The substantially purified nucleic acid molecule of claim 8, wherein said nucleic acid molecule encodes a algal protein or fragment thereof.

10. The substantially purified nucleic acid molecule according to claim 9, wherein said algal protein or fragment thereof is a Chlorella vulgaris protein or fragment thereof.

11. A substantially purified nucleic acid molecule comprising a nucleic acid sequence that shares between 100% and 90% sequence identity with a nucleic acid sequence of SEQ ID NO: 9 or the complete complement thereof.

12. The substantially purified nucleic acid molecule of claim 11, wherein said nucleic acid sequence shares between 100% and 95% sequence identity with a nucleic acid sequence of SEQ ID NO: 9 or the complete complement thereof.

13. The substantially purified nucleic acid molecule of claim 12, wherein said nucleic acid sequence shares between 100% and 98% sequence identity with a nucleic acid sequence of SEQ ID NO: 9 or the complete complement thereof.

14. The substantially purified nucleic acid molecule of claim 13, wherein said nucleic acid sequence shares between 100% and 99% sequence identity with a nucleic acid sequence of SEQ ID NO: 9 or the complete complement thereof.

15. The substantially purified nucleic acid molecule of claim 14, wherein said nucleic acid sequence shares 100% sequence identity with a nucleic acid sequence of SEQ ID NO: 9 or the complete complement thereof.

16. A transformed cell having a nucleic acid molecule which comprises:
(a) an exogenous promoter region which functions in a said cell to cause the production of an mRNA molecule; which is linked to;
(b) a structural nucleic acid molecule, wherein said structural nucleic acid molecule comprises a nucleic acid sequence, wherein said nucleic acid sequence
(i) hybridizes under high-stringency conditions to the nucleic acid sequence of SEQ ID NO: 9 or the complete complement thereof; or
(ii) shares 90% or greater identity to the nucleic acid sequence of SEQ ID NO: 9 or the complete complement thereof,
which is linked to
(c) a 3′ non-translated sequence that functions in said cell to cause the termination of transcription and the addition of polyadenylated ribonucleotides to said 3′ end of said mRNA molecule.

17. The transformed cell according to claim 16, wherein said nucleic acid sequence is the complete complement of the nucleic acid sequence of SEQ ID NO: 9.

18. The transformed cell according to claim 16, wherein said cell is selected from the group consisting of an algal cell, a plant cell, a mammalian cell, a bacterial cell, a fungal cell and an insect cell.

19. The transformed cell according to claim 18, wherein said cell is an algal cell.

20. The transformed cell according to claim 19, wherein said cell is a Chlorella vulgaris cell.

21. The transformed cell according to claim 18, wherein said cell is a plant cell.
